United States Patent Application Publication US 2014/0325702 A1 - sequence listing, part 50

SEQ ID NO: 161091 - protein, 109 aa, Heterodera glycines
LGLRKPCIWAFARLNMTHTVMSKRKLTWLVEQGFVSGWDDPRMPTVRGIIRRGLTVEGLKQFILAQGGSRSVVTMEWDKVWAFNRKVIDPVAPRYTALENASATLVPAT

SEQ ID NO: 161092 - protein, 161 aa, Heterodera glycines
MLQNGLTILLLISVVIGHSLANLGPTIKHNPHFKAVQTAHHLHDAIAKRHEAEVTQIICSISNEQRQALALEFKKQFGTDLIAMLKKEFKSDFEELIISLMQTPAVYDANQMRAALSGSNEAVLIEILATRTNRQITALKQAYERLDRRHQHNQLEEDIKA

SEQ ID NO: 161093 - protein, 118 aa, Heterodera glycines
MDSFLVTITPNHQKPVLDISDYRQYYSKKSLFDEDRTVRTFLEMCLSQFSINRDIYSPAGAGKLYEVSPEERVSAGNGIILRPGVAKGVRVVRNYGELAPALVLDIKVSPFYESNGLV

SEQ ID NO: 161094 - protein, 61 aa, Heterodera glycines
MADELVALAPGTRVSGRWTILKKLGAGAFGAVYLCKDGKGTVAALKTEPIDTRQPLLVMEA

SEQ ID NO: 161095 - protein, 101 aa, Heterodera glycines
DSFCPPKIRIFLLVEARAIQYAMERIFEGKPKPKLVFLTLEEGIDRLKLNSDNSLILDGKFTVAVSMARNAVHDAYEAGMEVWKALKRSTSIHVFNTLFMS

SEQ ID NO: 161096 - protein, 103 aa, Heterodera glycines
TVNSTLANEHSAVALSSAIPGNDENSSSPAVPSERSLELLKKYFGYSRFRPLQYEVIEAALSKRDQLVVMSTGYGKRVCYQLPSLIQNNLTLVVSPLISLMED

SEQ ID NO: 161097 - protein, 42 aa, Heterodera glycines
  unsure (1)..(42): unsure at all Xaa locations
YFGAHTFQXQSRVANDKFKVGAYTHVNWTGRGGNVSASTYNA

SEQ ID NO: 161098 - protein, 105 aa, Heterodera glycines
AFLFPIFLFPFSLLSSNVPKLLLLRFTLFFFLCVLFSLVDSRPQLLNSVSTSGLLIGKGSEVKSASVPLLSEPMIEIHSHSAPVSPSELNFSRRRRKRISNNKSN

SEQ ID NO: 161099 - protein, 74 aa, Heterodera glycines
CIGLNHSTMGILRNRSINRIPIRVEKCAENENGFADDYANYLFDSDQSDSDNADEENEVAAQIQSQPIGGHRRI

SEQ ID NO: 161100 - protein, 109 aa, Heterodera glycines
NVETVAVAPAICRRGGAWFASFGRERNRGTKLYCISGHVNDPTTVEEEMSIPLRDLIERHSGGVIGGWDNLLAIIPGGSSVPLLPKSICDDVLMDFDALVQVNSGLGTA

SEQ ID NO: 161101 - protein, 163 aa, Heterodera glycines
IPPVLLEQLQLVHLYLSWLYHFKWLYLLGQIFKLSSVLCLIIASFERYLITSHWTFSGFEERTRWLLLTVVLFISIGIRFTTSVDVVILFNEQSVVPFRRYIPAQMTHREWLPNFFNLLTVIIPFGTLVFFNGGIVLMLRRQNVQQLRLLITELTMGYDYMKV

SEQ ID NO: 161102 - protein, 139 aa, Heterodera glycines
GNFFTLKLITMMLRNRDLNVQPAAGAGAPLPKRQSAHLVKVVGGASSRASSQSSAGSDRDSKYEPRPKRACSQKDKENSHYNNNNHNKSSHNKSKKNTSGGTVVPVTAFSRSLLIDSAKKDVTVVSTAVDAGGGGVLAA

SEQ ID NO: 161103 - protein, 117 aa, Heterodera glycines
CSLFLLLFSALLLIFLCPPTSAQGRPPPSKSGRPTQHGRVTTDGEEKDGTAEGGAADVESGEKEEPGLSQKLLNVLLNHLISHLPKISTESVVNWVQETFGLDRQTSRNYVRKAHEI

SEQ ID NO: 161104 - protein, 75 aa, Heterodera glycines
AKAPSGESKPNPGQKPIGERRKRDVLGHAGGYVGGWDHPIDSTLDWAKSQWNDANWLADVVNTNGWENTGTPTGG

SEQ ID NO: 161105 - protein, 125 aa, Heterodera glycines
  unsure (1)..(125): unsure at all Xaa locations
AAGDVISPHRAVLTLSKXMFNAGCFSLPYAWMLGGKWVSLALTFVIAGFNWYGNHILVRSSQHLAKKSGVASLDYGHFAKRVCDYSELPFLRRHSKRIMYVINITILFYQLAMCAVAILFIADNM

SEQ ID NO: 161106 - protein, 120 aa, Heterodera glycines
PKHAPVLERAVDLMIKETKYDKDILMTLLKLYQLNPFLYNEKYVCLVLLKTMTNFPRNDFALAKYLVDAAKVNAPELRRVCQIGSLLESCNFALFWRLDDGRYKPRDSVDEPFKKPDEIC

SEQ ID NO: 161107 - protein, 191 aa, Heterodera glycines
KDGSILWGSDEEIGSHDGMEKFVHTDKFRSLNIGFALDEGLASETDTYSVFYGERCAWWLQITCPGAPGHGSRFVENTAGPKLTSILANFNAFRERQRHLLLADPNLRLGDVTSVNLTKIEGGVQTNVIPAQFVAYFDMRVTPTDDFQQMEAMIANWCKEAGPDVTFEFVQKGMCKSLTPTDASSPWWHAF

SEQ ID NO: 161108 - protein, 139 aa, Heterodera glycines
MAEGQKKAKQKKMIFWQEVFDNNKPDPSNTVVHNWYSRTTQERFLDTKRAVEKGFQVLVSSRRYLNYINYGPDWRDGTGTTRQIYYCDPRGFEGTYEQKQLVIGGIATMWGEYLDGTNLEPNLWSRASAVAERLWSPPE

SEQ ID NO: 161109 - protein, 85 aa, Heterodera glycines
  unsure (1)..(85): unsure at all Xaa locations
MLRSLGTENCPCPLGIEEVKPRSLRFTWSMKTTSXLAPDEMMKEIRKVLDSDGCEYEQRERYLLLCAHGDPSKDXLIQWEMEVCK

SEQ ID NO: 161110 - protein, 104 aa, Heterodera glycines
INDKMFLLFQFIRQRVFSGDSAKGTGEKERSGNENKTGGSTNVPNAKPCSNSLRFLIHLRYTNFALIDAFDTVPICRLASDSSGKVYLHSDIRILFSNKSKDLE

SEQ ID NO: 161111 - protein, 68 aa, Heterodera glycines
PFAPERYIWRLFIGLHGTPRLVAAFAFKNFLVTSSLWPFPFRPWYRWASQFACSLNFGRNSVTDLALV

SEQ ID NO: 161112 - protein, 124 aa, Heterodera glycines
TAEVRLESLSTSVPIFVVGCYRETFGFRTVTVDQNRIYINGRPFYRHGFGMHEDIGIHGRGFDRAAMVKDMNMFEWLNGNCYRTSHYPYAEERAYWADRRGIAVITEVPAVGIWKLNSSALLKL

SEQ ID NO: 161113 - protein, 152 aa, Heterodera glycines
FDALATPRPIFDYSLADVVSVFYNRYPNSFARHNISEDVLWREITDDRIVTKKLIVKKGSSFLSKLPKWISGQAKMQFMPTLEESIYCRRTHKLVTYTRNIAGKHLLNISERSDFRELPNERSAVARHLEVAANCRLHSLVEKVLMMALRKS

SEQ ID NO: 161114 - protein, 168 aa, Heterodera glycines
  unsure (1)..(168): unsure at all Xaa locations
EMLARKITSENFEELAQNLRKNALKLAKESTGKFHFLTENHFYGQFINYLAKIAQLKVEEALKKRRENDNLDELSEKETNDFSEGWKSLQMFVEMYSFGSELFMQLAANYGGKFPKKTRKTMKQLVVKKIPQMDELCQQFVDYFQAKFMKSIPXKLSIEPMNAQKSST

SEQ ID NO: 161115 - protein, 118 aa, Heterodera glycines
VSNATTPSASYIIRLVSTEIDPVELIPFELMNERTNEMLTFEKEYDHENMEDDENMEDEDASDDWLLKRCQIGETATIQWVWDPSDWQNVSLTLDSVRKNCIGQLSPPKADQMNAKIV

SEQ ID NO: 161116 - protein, 135 aa, Heterodera glycines
NAPNGLTLLLLISVVIGHSLANLGPTIKHNPHFKAVQTAHHLHDAIAKKHEAEVTQIICSISNEQRQALALEFKKQFGTDLIAMLKKEFKSDFEELIISLMQTPAVYDANQMRAVLSGSNEAVLIEILATRTNRQ

SEQ ID NO: 161117 - protein, 139 aa, Heterodera glycines
LCRLFTAAFFSSGLALPAPYDAESVVSSELNVPLLSADANVEAAITNESDAAAEIQAPSIPVPIEHQTAADITHPTETGNESSIASSSSTPKSEQTPKKVMNMKSALEGAAANVYGGLPLDKQPKTIAEAAAKAKQTPA

SEQ ID NO: 161118 - protein, 109 aa, Heterodera glycines
LFFALVLEKARDSWFFRFCAFLVALHLLVNAIFSVSFVYASAQNYPGGVALLKLQHKHRFLRDKPIAAHIDQFSAETGISRFLHLYDAWEYNKTENLAQEEFGRFDYIL

SEQ ID NO: 161119 - protein, 132 aa, Heterodera glycines
ILLTVLLAVVSFRLPASTGDKKTANDGSGNNSSAGIGTKIKRIVTAGLLFTSLATDGAEAIGRSNAQGGNAAGLVPSHVTNRSMAPPPPPVQFEMGANRLEKMRAHLRELAEKMPVNESKRLSPSGPDPHHH

SEQ ID NO: 161120 - protein, 141 aa, Heterodera glycines
  unsure (1)..(141): unsure at all Xaa locations
RLMASLGVRXMIGSNAAGALNGDFQTGDLMVIKDHIFLPGLSGYSPLLGITDPRCGSSTVSLHNAHDRELTKKAMSLGRQMKVPLREGIYVMNAGPQTETAGECSLIARMGGDAVGMSTCHEVTVARQCGMRVFGFSLITN

SEQ ID NO: 161121 - protein, 113 aa, Heterodera glycines
MHPKGSNESDGNDDTWKKWELADEFGNLFVRTFIKPISKEEDSQIFYGCVIDFPKHNEHFGFPKSVAIKQVFIRGDEYYKAKDMLIHEVEILKMAVQMEAIYVIKLIDYITVP

SEQ ID NO: 161122 - protein, 172 aa, Heterodera glycines
LRRTYLLGKCQFAPVLFGPVVYRPYQPNLLESGGNKLFGIGAGAYNTCVVLSPILVPYIAFSWTHSHHFSFLRFVLVFYVIAFSFRTIGRLTNVDYVRFIKLLGTVRKSPQNVTLLDTLKDYDFQVYAAPADFKASPGRTAKWHPPRERLPDLNPPLNFLRQAIAWTAANTF

SEQ ID NO: 161123 - protein, 164 aa, Heterodera glycines
  unsure (1)..(164): unsure at all Xaa locations
DYPLDWYKSVVAGQLXSFGLFRDDLLTALIVAQRKXIFECEYEDRNLYKDPNASAIYILSLAVSDRYRRRGIGTLLLNHLITNYSVPLASKLIFLHVLSDNHSAIVFYRKNGFRHHMTLPKYYLIDGQYRDGQTFVLFTSQGVFGEFVSSVGDWCAMAMSFLTS

SEQ ID NO: 161124 - protein, 88 aa, Heterodera glycines
RYCGRCARAKDRQNFQFLLEDYIKALNEANERNKQLVVSVKRRIGRLDEEKQELARHIESLPDLTEMFGSEPATTNLPSLGELFTPTS

SEQ ID NO: 161125 - protein, 124 aa, Heterodera glycines
MEVEVEAVAKAEAEEELDPKGRVQQLLEMGKSLEWEMAVQSDDEQILDLDDDLEMFPRLIFLQLAKFLKNAPDGLNEQQKKELKKVLANWMEEQKQPFTVDEEMAQVDETVQSLSTFCDQIGKS

SEQ ID NO: 161126 - protein, 47 aa, Heterodera glycines
FFLYCLNIEFAFDEIIFQFAFVPISFIRSNSLQINQNYNLKLTILNG

SEQ ID NO: 161127 - protein, 144 aa, Heterodera glycines
MMMDTSENDEHHQHQPGEEGEMPPPPPTPSLIELLDVETNEKMLFPLDMDEEVTVQWPDNATIGTSVTDGDVPAAPIILKLCWDRAVRTRFESMEIGHLMEREVNMMASLKQSYTLKECIDMYTQQEQLNEEDSWYCPNCKTHR

SEQ ID NO: 161128 - protein, 48 aa, Heterodera glycines
  unsure (1)..(48): unsure at all Xaa locations
FFIFFFFQFFFFFFVFFCCFFFFFXRMDSFYYAWRVSFCVVKQIKVVN

SEQ ID NO: 161129 - protein, 86 aa, Heterodera glycines
  unsure (1)..(86): unsure at all Xaa locations
DLSSAVGEEIFVRHRLILCRNIEAFERMLTQDXNGDKKELXLTDDPQCRPMFGPLLLFLYCHHIXVECXNALPALISADKYNVTGL

SEQ ID NO: 161130 - protein, 182 aa, Heterodera glycines
MASSFCSSIISIVAIVCLLCKCCFSAPHPCCPGSQHVVSMMKDHTGTFSASMPKSSLCMSAERVAAAVENQLKTIWCPGNGSQTLINEINATQSSSDECARSLGFVRAMFEIAASAASHAGANADLAVQFREQVGTIDSNCAALGIHVGQISLDAPRGDHPQVHDSESVLSNPGTSGSHKRF

SEQ ID NO: 161131 - protein, 217 aa, Heterodera glycines
LTYATEERGKGMALIGGSFSLAFLIGPSIGAFFSIGARESGEFDPSPALPAIALTLAELALLVFFLPETLAKAKNDDCHKQSGHSLRHLLSPRALFSFDFLSPASASSPPVSVPLLQKYSRVYFLFMLLFSAMEFTLGFLTHLRFNYSSMQQGRLYLFSGFCMLVIHGFVVRRIPSTLKAQSHGALVGLVSIVPAYFVIAFAHCQNALFMGLLLFSV

SEQ ID NO: 161132 - protein, 229 aa, Heterodera glycines
  unsure (1)..(229): unsure at all Xaa locations
MDALKRLASRARQKSAEIILSAEKTEIGAELEQLLTKTDKTEEHMKKLVHAIEVYLQPNPAVRALDPRKDKSGRQNTLDGLGEAMKEAASKAVGAESTFGAILLKVSQTESKMAAGERQLIQSVTTQTLASLRHLLENELRTVQKERSVLNKKRLDLDATKSRWKRASDDKKPSVEAELRKAQDEFDTQLETISTALEALQXAVDRQAEQLVQFVAAQIVCHSSSLKLL

SEQ ID NO: 161133 - protein, 172 aa, Heterodera glycines
AAQFGRRGRRGGRCVRRVPNPFLAMSLQQQRQRLPIAKCRNHLLYLCEHFQTVVVVGETGSGKSTQLPQYLTEFGWAENGRRICITQPRRVAAISLASRVADEMMCRLGDAVGYSVRFDECISARTHIKFVTDGILLRELMSDPLLQAYSVVIVDEAHKRSVNTDLIIGSLR

SEQ ID NO: 161134 - protein, 173 aa, Heterodera glycines
MQMDGLLAISRRVWRLNENLASVQNYLSLMLVTQKINCWDIQHCHRDLFIHDGALLVEHAGNGHFLSVRSLSAANETHGVFYFEVTVLRMQSDLGVGFLSDFIGMHEMVGHCESSFGYWSYGSLHCDCSTADAHLDGFPQFTTGDVIGCGLNAFNRHVFFTLNGEKLDMDSCC

SEQ ID NO: 161135 - protein, 241 aa, Heterodera glycines
  unsure (1)..(241): unsure at all Xaa locations
RNIHTQLLMSANRRLYELIDLHRKCKEDLPWKYWIALAEKDKNCNDFVATLQELVKEDAYASIDGSGSNALLIRLRELYPSVNETLAWTELQKFSEQFPSTQRMVQALHELIETPGLYCGPVPKSSSSEEHFYHSVACVGPPPVKIDAGVQSTSSSTAPIPKPLDKSMKPPPQRPPDDFSEHLYDVPPTIDAHPPPQLKQQNIVPPIRQPTSSASAAVPLPSQKLVXVFSLWFAVCLCRPR

SEQ ID NO: 161136 - protein, 227 aa, Heterodera glycines
  unsure (1)..(227): unsure at all Xaa locations
LQLPTTDEENEELGYRTPDDLLLWKVLRRSSAAPTYFDIMDDKYIDGGIIANNPSLELLQQIQYWNIFNKHKKFPNAVNVGCFLSIGTGVIPTTPLERTHLEVSPNWITQPITSIKAALTIGEILVDQATAAEGVPVQRTGAFCXNNGXPFFRLSAPLFRKIRLDETNDADIVQMMWDCMGVHVQASGLCGGCARCCDGLAMRSTGAVCSKPMGRHVFCSCWTKRRR

SEQ ID NO: 161137 - protein, 257 aa, Heterodera glycines
EDETRHAFLARILAELKHLRTLDLSEWLLTDFTVLQKLENLTSLILYDIHNLEGSIDTLCKFCKLTGLDLSQSDRSSSGLYAQPVTALHKLVSSLPKLKYLDISGTNLTTLPSENDRPFRGAGTIDSDIPGLSYLKKPLKYLGIFNCESSSQYKNIPAEKISGDHGEDQVLTAMEMYLERPKTMQAVLNESYHLYRFGTNLSRQVEALHLVLKSMSLHLNNSNLQIAGSASMFYIIRSVKMNWSTRRRVIFALIDGM

SEQ ID NO: 161138 - protein, 133 aa, Heterodera glycines
IANKDVEVVQIANKDVEVAQIAKTAEPAEFKPTVEPDAEVLKTLNTVEPVGFKPTTEPTPAVTTAVSVAPLSGTLTFTASSIPISGSLFGGACRPGTNTLSNLAANVTAKTTEPVGFKPTVEPLLPAVTTTAV

SEQ ID NO: 161139 - protein, 82 aa, Heterodera glycines
  unsure (1)..(82): unsure at all Xaa locations
CAFSCRRNCRDGRCDSXLGLCLCPAGLFXRIATMPCPLWSHWSNCRLECQCSREGTSKCDAKGNAFESRTSKANFANGVFAT

SEQ ID NO: 161140 - protein, 86 aa, Heterodera glycines
SAFGNWSTRRKPKCRWTVSDQRHGLNCAADQHMNAGGRRSRTNAIVLIKLEQYTPTTPSSFAVRRVIDPLISNHSLAHHLIDLIPT

SEQ ID NO: 161141 - protein, 196 aa, Heterodera glycines
TLQALLTVTTFLVPSHAHRDRVVTISSPENSNFIQCAPSYAFRKTGVLEIANFEPRWEQMLYTLFLAEGWIVNAPDHEGPESAFSAGRFGGHMVLDSMRAANNFKPLQLSKRPMHIGHGYSGGSTPNGWAASLHETYANELNVVGWSLGGSMTDPLYTLNSLDGKPTSSLAVAGAIGLMDAYRDEVRNLLDDEVWT

SEQ ID NO: 161142 - protein, 193 aa, Heterodera glycines
MNFACCCIFKSCQRYFSSSRKQTEQYLERQANDQYSRRAREHSYRARSAFKLMQINDKMHFIRPAPGSWCQVLSETDECPFDGTEQRQGYILGVDLFTISPIENVDLLCKADFTRRATQTEIRRRLNGRRVDLLLSDMAPNPTGESYMDHLRIIKLCRDLFMFGTVPDPEPILAPNGILLCKVSIHYSIKKKS

SEQ ID NO: 161143 - protein, 257 aa, Heterodera glycines
DSPPMPTHSFKDLRINCIDHSVIAFLRANQLIFQKGSNLRLSLPFGPFNIDDVQSIWDDFARQIWPIFAPTIRHFGVPDGHLLDTLLRLVSPTILTDDLINIHSINSGRQFPEAIGDDHFEGPTTATLDRSTTNYDGSIATSAAAGQALSKWLHISRKDGQPKQLRFRNFANPPNMEWQNNFKEKFLRAITSASYKIYFKTDASFEPFELVNERTQEKLTLIFASETIWAKRWIMKRCPIGETAAPIHWERQILTTI

SEQ ID NO: 161144 - protein, 217 aa, Heterodera glycines
GAPSAHPSSPCSSSLLPPPVSSLSVPLHHRSSISGGGSRPIVIRKGPQGFGFSIRSVRVYLSEMSEYYSIEHIVAAVREGSPAWEAGLRTNDLITRVHTQSVHNMTHPEMMRRLLSCGDELTVHVVPLSSTSIKEGEPRRNIGKPLRKKPRRPPTAQQKNKQQSRKGSALLRRLSGKRTVGDIVPGTSSQKQMFIPRSVSSQEGRAQLFNSSTSKLE

SEQ ID NO: 161145 - protein, 250 aa, Heterodera glycines
MKLLLFFCLLLAKFEFIWQMKKPLVINDNDKAEGSTGPSAANHQQNVSEQYLTKLELENRLLKAELKQREMMEELKELKDANIEQQKKENAFIGQIQELKDEQQKCLDKYEALEKELARKYICIGQFAKLLTRIDGMEAQINGLKEKDEEGSLSSSVPVEKQINEDPNSTNRHGMGIVIRTLTGSRHILKVHPSDTIEEIKAKIQNIERTPIDKQRLIFAGKQLENGFTLEYYGIGNGANIDVVLRLCGC

SEQ ID NO: 161146 - protein, 19 aa, Heterodera glycines
LHLISNKFGYQKKKKKKKK

SEQ ID NO: 161147 - protein, 176 aa, Heterodera glycines
SELNAQIGMEWAKAAIAKALAEAANISLIRIVDLNLDELNDGTLYAFFAIGAPSGAIQAQTIYLLKEITVAEAVQLLNTSVVSGKFAVRIPLATEAETNTELVFSGTQFGKQSSPLPHPCPPPGPSPPPQFVGFSGSTLAIVAIFCFISGAFFIAGAYIVHQKRQYIRGMAYQVFE

SEQ ID NO: 161148 - protein, 221 aa, Heterodera glycines
MIASENNHLEAQNGNSPEGEEESNCGGSASPSSLRDCHSRASTNEHTNISHHSLHDDNAPPSPSLANISTNIELHPHNNALGGSSSHKFIKRPLNAYMIWTRQERKRILTDDPKMKMNEVSKAIQMGEKWKKMSDKEKKPYFEMAKKFSEEHKLVLQEHPELQYAPSKKKVVKKLADGKQLSVVDSSSVKSCTITPDASRSTTPRGSSNLITPQPVSQSQM

SEQ ID NO: 161149 - protein, 51 aa, Heterodera glycines
YALNDPNRLLAVVPFLVRTNFNGARVVQRALISLVQCCIVRQVDSQPSMVT

SEQ ID NO: 161150 - protein, 42 aa, Heterodera glycines
EVIESATILQLKEGESDRKRRNLLITPLNWQMPSLRFPPPPL

SEQ ID NO: 161151 - protein, 128 aa, Heterodera glycines
DGAVLPGAGAFEIAGYCALKKLADNVKGRAKLGVLAFAEALLVIPKTLAVNAGFDAQEAIVKLVETFSAAGELVGLDLESGEPCVPQSVWDNVCVKQASLNACQNIASNLLEVDEVMRAGMRDLKGGQ

SEQ ID NO: 161152 - protein, 254 aa, Heterodera glycines
  unsure (1)..(254): unsure at all Xaa locations
ASVRKALVFALFDYVRENGGEKRPKAEEHKEFANVTKTYFASLHAFVLLTDLNYEEFALKLHFQIQNSQEKFAEYYTNLKSKCDNWTVDKWQNKMERIGEKIVDKSSKEKCREFAVKLDEQRNRSQNEQSENIEPPKQTSFHRTSFKRSVKTSKIFADQRILRNRPISPLDAQFRAELFQFLDSLFLPNLLPFPNKFVAGPGDLALLDPSLSVEFDRCFSDCEQSDEIKQLDIVNVYSVLVSHDSLYYTXPLST

SEQ ID NO: 161153 - protein, 227 aa, Heterodera glycines
  unsure (1)..(227): unsure at all Xaa locations
CETYFEEALYLTHSLVLVHISPEMWTVFDLXYKAFLEEGTSFFSDCAPVLHAFLTNDTDNFLSVFDRVQHFLAMCEKTLNDEGEDGCDESTKAHAAKMLEVFVLQCQGRASHFIPDILRLVFNQLQKESADLKLGQLKPQLLIILIAALYSDFQLCSNLFGQLQFKTEIGTFEWLIRELYSNRKDFEGVHDRKMLIWLLCRILADGNLPALFINQPEKFMEWLLTLF

SEQ ID NO: 161154 - protein, 233 aa, Heterodera glycines
MRALCEGLRKSVKVHPSGKNETLAGTATAAEESDCQFTVSSTSSGTSTSGHNASAHSRHNAAEKMSQDAEDGPEVLYHDERCQHTHAHLYNAARPPMNQDEFDHRFAYRGPEQFSDERDMCRQTGKFFRQYYRPCLSPEAFWHFILRFVPILNWLPAYQWRQCLLADAIGGLTVGIMHVPQGIAYALLARLHPVVGLYTPFFPPLFYMLFGTSRHNSIGSFAVVSLMAGMAVE

SEQ ID NO: 161155 - protein, 263 aa, Heterodera glycines
  unsure (1)..(263): unsure at all Xaa locations
NPPYYPPNPPYYPEYRQPYEYTSDGYYDSRQNRHGAADRRDFYDNHRDDYYDNRRDYFDNRRDDNYDNRRDNYGGTSFGFGSGFAGRSLPPVLNENNFDPGHAQGRLVGATIVPPEEQSHLPPVFYGSSRRFRRSAAGDAVGSGFLNSYLYPVPQSPGRKRVQNRRNGGRRTKRRTMLCFVPSPATRQSGNMEFWRHNLLKYSPNQFQRHFPYRTNGEMNSQDQSRKSKRQTDFPRGAXFPNNRRGHYGDGGGRYDAGETIRR

SEQ ID NO: 161156 - protein, 257 aa, Heterodera glycines
  unsure (1)..(257): unsure at all Xaa locations
HPDEAVAIGAAIXGGVLAGHVTDLLLLDVTPLSLGIETLGGVFTKLITRNTTIPTKKSQVFSTAADGQTQVEIKVFQGERDMALDNKMLGQFSLVGIPPAPRGVPQIEVAFDIDANGIVNVSARDRGTGKEQQIIIQSSGGLNKDQIENMVREAERHAAADAEKKEMIEAINHAESVLHDTESKITEYAEHLNADEVNVVKEKLEELKKKLANREGLKSAEVKESVNELQQKSLKLFEVAYRKMAEKNQQHQSSSTE

SEQ ID NO: 161157 - protein, 127 aa, Heterodera glycines
LNIKEIERKLIILEKAIQITRNSATLLSFFDEFCKPSLHVKLLLRTLCLSGGVGLLHLSFDECGLFMHSHGAVVFGPLGTVVRLSSLRINRRSARRRNCAHSGGNSLLRLSNGRLLLLMDLLLLHLG

SEQ ID NO: 161158 - protein, 223 aa, Heterodera glycines
MGEFFFNLDHGYLEALIRGFKSGLLTSTDYSNLVQCETLEDLKLHIQSTDYGNFLANEPGNITVQVIDERLKEKLVTEFTHLRNNSLEPLATFLDYITYSYMIDNIILLITGTLHQRPINELISKCHPLGSFEQMEAIHIASNPAELYNAVLVDTPLAPYFVDCISEQDLDELNVEIIRNTLYKAYIEDFYNLCKKMGGKTAEVMCEILAFEADRRAIIITIN

SEQ ID NO: 161159 - protein, 37 aa, Heterodera glycines
SLGCLISDLTHITCVALTVRFPNGKPVMPAVLMNWPT

SEQ ID NO: 161160 - protein, 240 aa, Heterodera glycines
  unsure (1)..(240): unsure at all Xaa locations
KPTRGMEQTMQSIFPRIQVALRRSMQTFQDSIEAELAQWRYCSKMQSSKMEALIRLVGESVEVQIRGPPEKATACIYFLEDLSTLVELTSAEVAPGISTERHFLSPAHLREHRTTPAIFTPETIMEMQQNESLVIVNSDGEEEXEFTDVVCFGSKEAAGLLTLGVDISVSQLQLSARSELAALLDAPNTLGMDWSILAVKLNLTEQIPEVDSSGQSLSRTDQLLTEWALHSPDSASVGKL

SEQ ID NO: 161161 - protein, 69 aa, Heterodera glycines
ERATLCVLKWCCVNAVVYNIIHHIIIILCVCRVSVCWLLSHSFIIISLLLDLNFKMIINLFYCANLLIE

SEQ ID NO: 161162 - protein, 223 aa, Heterodera glycines
CIIYGHCSDFGSVPVAPLHLSSVHCCLCHPNVFSPNDFACAKKNAIFHDGLFALTEDNRLRIDPSKQKTNDTGTQLDALLLNPIKERLVFSLIFIKGGENCKQFFMKHAERPSCCLFSDEMELHKHPYAKGECQAQKCTYVDMTCSVLPMDPVEGLKDSYHFKASSWNTASGTDEMQQCDWIAFADGIRILQKKAGNDTKALEEKCWKKVADGSSAIRVALLD

SEQ ID NO: 161163 - protein, 142 aa, Heterodera glycines
WITKKGKVRQKTKNIRLIILFLSVFVLLVPIFFPCFVLLIRHLLVPIGRSIPLFYVFLLYLCHSFNVFAYNFPELGEIIRRTQKTFFNFTVIIRSIPWLPESICSITFSCGSFRMLLSHITSDDNSGNSTDRSSRLRRRTFL

SEQ ID NO: 161164 - protein, 97 aa, Heterodera glycines
  unsure (1)..(97): unsure at all Xaa locations
SETHSRHRGETHSRHRSETHSRHRCETHSRHRNETHSLHRCETHSRHRSETHSQHIIETLSRHISEKYSRHRSETHSXHRSETHSRHRSETHSRHRS

SEQ ID NO: 161165 - protein, 58 aa, Heterodera glycines
QVSNEPVQIAKESTILFTRAQLSENVQKSDVFLRSTTVCAKQKNGAVESLGKMKRCVS

SEQ ID NO: 161166 - protein, 176 aa, Heterodera glycines
  unsure (1)..(176): unsure at all Xaa locations
GLCNDGTAGYNSPPAEIPSIVRRTHYHRVMVGLGQKDSYLGYEAHYKRGILTLKHPIEHGIFTNWDDLEKIWHHTFYNXLHRVPEDHPVLLTEAPLNPNANIXNMTQILFXTFNTPAMYVAIHAVLSLYSFGRTTGIAYDSGDGVTHTVPIYEGFALXHAILRLDLAGPYLPDYLM

SEQ ID NO: 161167 - protein, 83 aa, Heterodera glycines
VKIEKRIVWPKMPFNLSLCHSLYINRLGRSVETVARFAFERPGQIKGAQRKHFFGHGSISDITGGKVDGNFFVAHFLQRVKTL

SEQ ID NO: 161168 - protein, 130 aa, Heterodera glycines
RGHGMSGHFACPLLRRRNGMRRARKDSSPTLRLRTTMAMCTTLRLQNGVTWLNNLRAHYSANLLLTVTTMPTNRIMQMPIIQTTLCLYGQSNYIRNEQEQRREYGTDMGLIQFLTVAHPIMLTIRLTCQA

SEQ ID NO: 161169 - protein, 42 aa, Heterodera glycines
KWTLSRMFHNQPPVTLLQRSGCYCCVSPPITSGDHHHREGSE

SEQ ID NO: 161170 - protein, 63 aa, Heterodera glycines
AQRMVKWWSVPQGVGESNYYFGWARCVRFRQIGGTLRLLPLFIIVEQDWLAVGELLDGLHRRP

SEQ ID NO: 161171 - protein, 92 aa, Heterodera glycines
  unsure (1)..(92): unsure at all Xaa locations
MFNLFLIIVKIESEKKKYNKSHLAKYLEKNGKKKKKKKEMNSKKEKKXAKYYKIKEKIKQKGRKHSTKEWNKIEEKITKKLGTNRKKKKKKK

SEQ ID NO: 161172 - protein, 112 aa, Heterodera glycines
TDFCSFYVQNLQAKSGGSLKLTNGATDGHALCTLGMEELTLNGGHDWLVLLNLHRFCFWPPIDGSGRMRIGWLSLTEPLLHVSSEYGTVSILSARICPLWANRVAFPTDEFQ

SEQ ID NO: 161173 - protein, 204 aa, Heterodera glycines
  unsure (1)..(204): unsure at all Xaa locations
MIPSVGQPQPQQHGLLLTVSPKKSTAVVTDAENASAIVPNGDDEQAMTNSANKKRTDYLSWDEFFMGVALMAAQRSKDPITQVGACIVKENSIIGIGYNGMPIGCNDDEMPWGKGDANPLNNKYLYVCHAEMNAILNKNSASVDGATLYTTLFPCAECAKMIIQSRISRVVYXERQNTVQMEASRRLFTSQASNSADTNPLVPE

SEQ ID NO: 161174 - protein, 218 aa, Heterodera glycines
QKLYHLEDFYRFHEFHSPALDDPDFNAKPMILLVGQYSTGKTTFIRYLLEQNFPGIRIGPEPTTDRFIVVMYGEEEAVIPGNALVVDSTKQFRALTKFGNAFLNRFQCSMLKNEVLNGVTIIDTPGILSGEKQRIDRGYDFSGVLEWFAERVDRIILLFDAHKLDISDEFKRCIEALSGNEDKIRIVLNKSDMVDHQQLMRVYGALMWSLGKVFKTPE

SEQ ID NO: 161175 - protein, 190 aa, Heterodera glycines
MDKLVLKIRELLDENEVNFGEVQRILEEYKSEPKDWRHFTHFDEHKYTRNLVDAGNGKYNLMILCWGPGMGSSIHDHSAAQCFVKVLDGQLLETRFAWPKKEKEEKEEEKEEEKEEEEEEEKEEEEGPMRATGTELFKTNGVSYISDKIGIYRMENPSHVDPTVTLHLYIPPYSQCYSFDQVMVPIIFSI

SEQ ID NO: 161176 - protein, 190 aa, Heterodera glycines
MDKLVLKIRELLDENEVNFGEVQRILEEYKSEPKDWRQFTHFDEHKYTRNLVDAGNGKYNLMILCWGPGMGSSIHDHSAAQCFVKVLDGQLLETRFAWPKKEKEEKEEEKEEEKEEEEEEEKEEEEGPMRATGTELFKTNGVSYISDKIGIYRMENPSHVDPTVTLHLYIPPYSQCYSFDQVMVPIIFSI

SEQ ID NO: 161177 - protein, 218 aa, Heterodera glycines
IVFYSNKAAVFFEEGKYDECIEMCGKAVEVGRENRADYALVAKAYARMANSYKMKDDPKKALHFYEKALSEHRDPDIVKKHKELAKEVKEMEQKAYIDPELSDKEKNLGNQLFKKGDYPGAMRHYNEAIKRNPDNAVLYSNRAACFTKLMEFQRAVDDCDLCLKKDPSFVKAYIRKGAALSAMREFGRAQKAYEDALQMDPSNHEAMEGLRTCMQSNE

SEQ ID NO: 161178 - protein, 142 aa, Heterodera glycines
LRFTADSMTASFVEWFADTLSYKSCLQPEITRGINGKLKWPHGTQLIVEISLKNVFYVEWLLDDRPLNSCEELFRDGRLLKGGGDGVQIIDSLYSYGEWLSRLVLPAALQNNCGRASLALLTVRATNKLGNSCESSVRILPT

SEQ ID NO: 161179 - protein, 63 aa, Heterodera glycines
  unsure (1)..(63): unsure at all Xaa locations
SSPRSSRFRSARSFRYKKRMSVRGPCSAXAAFAFCSSAARPPGPCPLPRLLLSXARXXVRFLP

SEQ ID NO: 161180 - protein, 77 aa, Heterodera glycines
  unsure (1)..(77): unsure at all Xaa locations
YALLLLSVGLCFAQFDQSPSAALNHVRAKRGYKPWKKQSFSSSSSEMYRRRRPSGNGHYWXITATVAMDTIDENPAF

SEQ ID NO: 161181 - protein, 178 aa, Heterodera glycines
  unsure (1)..(178): unsure at all Xaa locations
TTSVTVFAAELLREAEVMIGQRIHPQVIVSGYRKAARVAKDALENAAQASGEHLREYAXKIAKTSLGSKILSQHSNHFAKLAVDAVLRLGPNGALDSVQVIKKLGGSMEDSYLDEGFLLEKKAGMYQPQRIEDAKILIANSPMDHDRIKVLGSRIRVDPVAKIAELEQAANKNKPPKK

SEQ ID NO: 161182 - protein, 204 aa, Heterodera glycines
  unsure (1)..(204): unsure at all Xaa locations
CWAPNEFKGQWMRYAEGYCFVENTYYVSMRERFPMREIDREQREIIYYQWXXFLLLGQALLLMAPKFLWNAFNWKSGLNINLLVQKAHKQCKAGTRKDKEEASRQIGVRIHCVLQHNMLAKLDIVDHDGSGRTMPDHVDWKSVKPTHSSVSFFYILFKLFNLGSALVQLCLINYFMVPANYTYWGFDVLADLVAGRDWSRSGLF

SEQ ID NO: 161183 - protein, 183 aa, Heterodera glycines
  unsure (1)..(183): unsure at all Xaa locations
NSTMAEEAVVASEMESLALTSSSPCSPVLSLLSEEMLQKEVPCVCCDGDKVVVRLSILSQRGFFAKMLPDLNVEANGLSEDFLFDMTKAEIPADTFIKIVSWMEEHMGHPVPAFDADPITFERKWLTQSDCQTNSSNCEFAEAAALLNAACFLDLQLLSRHSSQAVARRXKDRSPEEIRDMLH

SEQ ID NO: 161184 - protein, 51 aa, Heterodera glycines
YALNAPNRLLAVVPFLVRTNFNGARVVQRALISLVQCCIVRQVDSQPSMVT

SEQ ID NO: 161185 - protein, 51 aa, Heterodera glycines
IRPLQHLWESSNRRSNVRSYSPNSWRNMVKLFLWKCIRSQSPQHTSRKHKV

SEQ ID NO: 161186 - protein, 46 aa, Heterodera glycines
  unsure (1)..(46): unsure at all Xaa locations
GASEKDVSCVGRHIXIDLGRGIFLXRPHRWVFPSXHLLXXKKGGGG

SEQ ID NO: 161187 - protein, 209 aa, Heterodera glycines
MGILRNRSINRIPIRIEECAENENGFADDYANYLFDSDQSDSDNAEEENEVSVQIQSQPIGGHRRKKTKSYRPIEIVDGFPLKRNMGAQKWRRVENTRLLTSFADTQDICFDGSDLIPETISAFSRLLRDEAKMKVWNDFLEKDESGQKKMLSQFEYEILMARDASKAQHSQQSVKNTDIKKSESQPHNKNGQPSSGGGKSSSDCFQRL

SEQ ID NO: 161188 - protein, 154 aa, Heterodera glycines
ENEVSVQIQSQPIGGHRRKKTKSYRPIEIVDGFPLKRNMGAQKWRRVENTRLLTSFADTQDICFDGSDLIPETISAFSRLLRDEAKMKVWNDFLEKDESGQKKMLSQFEYEILMARDASKAQHSQQSVKNTDIKKSESQPHNKNGQPSSGGGKS

SEQ ID NO: 161189 - protein, 233 aa, Heterodera glycines
QCTRVKRSIDKVFCALSASTNVFSHTSTRKPFFALSQPGGHPRNWHSLRDVAIAHVRNVRNIFQIATHCKILVHSPGVGSASITKSLADASVFDKSEEIDEDNANKSLVNRNGSLLLNSSTGSTGVLNELYEAKHSFFVPPSLNPRSADAFLSERVHCRRRLIVVPLFCDFIVNRCKELLFAPAPIVSFYDTLCTLYAIKALSKVISHSLHEDEFGVVQNDMSKSLSELTRLS

SEQ ID NO: 161190 - protein, 214 aa, Heterodera glycines
  unsure (1)..(214): unsure at all Xaa locations
MTSEKNLPLTIGVCASSVALGCIAYKLLQRKGSQQELLDEMTLRKKKDEAHFMDSLKLDPNTPLNSHELALASLISFSEDAASFEKVGGCSSILELLRQKVVVPLQLASNRTTLPSLLYSAPKGILLYGPNGCGKTLIARAIAKEVDAYFINFGTSLVDFVNGSSVTMKSLFTLAEKIQPCVIXIDEIDLLFHRNRNDFQLLKTQFLAQWDEFL

SEQ ID NO: 161191 - protein, 188 aa, Heterodera glycines; identical to SEQ ID NO: 159813

SEQ ID NO: 161192 - protein, 143 aa, Heterodera glycines
  unsure (1)..(143): unsure at all Xaa locations
KDPKKCQHFQILLIVLLAVVSFRLSASTGDKKXTANDGSGNNSSAGIGTKIKRIVTAGLLFTSLATGGAEAIGRSNAQGGNAAGLVPSHVTNRSMAPPPPPVQFEMGANRLEKMRAHLRELAEKMPRNESKRLSPSGPDPHHH

SEQ ID NO: 161193 - protein, 51 aa, Heterodera glycines
TDNFNRAVNAVAGPGGAPVCAVNVDAVTSNDDPACVPLNIFGQGKVSAEAR

SEQ ID NO: 161194 - protein, 131 aa, Heterodera glycines
PIPKESRFFNSACCPNIRLVHLFRNWLSPDRPLLAFVAISEIGVGEELTHYYGDRWFLDKLSVRPKCVCRCASPFCVWPPKAKRRDDFFSRPKDRQLKANKVRAELTQRRSGQEEETKKKRNTEEKEKMEG

SEQ ID NO: 161195 - protein, 180 aa, Heterodera glycines
MNANSARTTGGGALLHLSPEEALYLSHDLNVLTLSSQQNDKATLADYSPEQFFADLCAFHPNFASILYRYLVYRYFRRLCWVVRDGISFGVDFLLYKCSVDEYHSSAGVRIVHSAHEPIAAETSIGALQRELANCKKRLLLANVVGLPGKLQNLRLTQLWSGQCSGAFYVDLECEQKSYF

SEQ ID NO: 161196 - protein, 218 aa, Heterodera glycines
  unsure (1)..(218): unsure at all Xaa locations
GGESRIXNQVEALTAEKRRMEKTLQTTSREREELAQENKKLAAKLMNRKAQDRIIGERERGLEEELRQERLKSESANARIRELEQRIECIQDMNRDIAVEISNANSPLLITISSLEEKLLGLERENDILTRSTRQMSAELGAMKRRHEAEMGTIERSLEEEKQQNAQKTEELAKAFSERANIQTRIEKLEDELLQSKREHSERVNRMEKRMEQLETDI

SEQ ID NO: 161197 - protein, 87 aa, Heterodera glycines
  unsure (1)..(87): unsure at all Xaa locations
LSKLNQKRKSYNKSHLAKYLEKNGKKKKKKKEVNSKKEKKXAKYYKIKEKIKQKGRKHSTKEWNKIEEKITKKLGTNRKKKKKKKEL

SEQ ID NO: 161198 - protein, 212 aa, Heterodera glycines
MNINYQFSDIIGTVYKNGQVKFMPDGNVLLSPVGNRIKTLDLKLFSSCSLATQLRSNITHFDINFAGTHAFVMTETGHGFYLNLFSDTVLHQQLFSERVRALKFSPDGRFIAIGVAGFVHVYSIVPFHRVQFNPFIRVNKFKHSADRINSLDWSDDGRLIIAAGENRVVKVFAAFKSTFANVGVYVLNERASVVGARFFDEYNLFCVDKIGS

SEQ ID NO: 161199 - protein, 129 aa, Heterodera glycines
SHRAKEPARTTEKAKETRTWKRDQPKRRKRSLELNLQQLFWAWQCRWSKTKKSRKRTTRVATKPRRRKKRTRRQRTNNRKKAPRRQRKRRKVRQRRRRPRTRRRPRKDRPQRLPTAAPARDRLQHRALR

SEQ ID NO: 161200 - protein, 71 aa, Heterodera glycines
RPQQTSKYLTNTPMNSVESPTPMHQTLSTRCVYPGLVLLICPHDGSLATDYWCIAANKNPDAHKKHSDSDR

SEQ ID NO: 161201 - protein, 133 aa, Heterodera glycines
FLSLFSSSLLPLSVALPFAPPANFVSAVCFFSLFNYSFSPSPFSACIGDQCPPTCPGVCTCVGRRDCCTDRNAGGGGDGIAGGLISGGGASLPRLLLALLLGTGRPGLPSLQLALCRDNALNCPLFLSYCQLP

SEQ ID NO: 161202 - protein, 153 aa, Heterodera glycines
SEHKMRMTQDANLGTFCALFTFLLIVEGTFGIFGIGSSDNDTTTTITQGGGGTSTTTAKPKGGGTAHDENHSDDSSIRGKAREKRQQTNQQQQQPNLESLPVCATGQSPIAPIPPAGPVLPIGAIPPTVVCLKCRPPNGPLSGNNGANGNNGT

SEQ ID NO: 161203 - protein, 65 aa, Heterodera glycines
  unsure (1)..(65): unsure at all Xaa locations
RHSRIQHGIVXVADRRPLRVLTERRNILGPLVRTYESLLSVDMXTRNHXSDPXGALHTAYRANLP

SEQ ID NO: 161204 - protein, 71 aa, Heterodera glycines
KSKNVYALDHNINNRSRPPLLGRPVTTFSRSSLVASSWRSALAHFVMLDSILFSSNFARIVFQFSQELFFN

SEQ ID NO: 161205 - protein, 166 aa, Heterodera glycines
CAAANEWPQLNEFLSIYAASALQQQQQKSADPQQQQLAAQQAAAADSWLYNWEWMTAAAAATSKPTQQQKPVNSLNLTPGGTTPTKVNKGTPNERRTAVRGSSNSNNGNALNMLMSAGLPLLSTLSLSGIGTGNNGTAEVAQRNCEEMKPQQQQQQTNLNKQQTKR

SEQ ID NO: 161206 - protein, 245 aa, Heterodera glycines
FPSPTFLFYSSNVLPNGTDSSLLDDGQWLDGHFPLHHAVFDNDVPRLGQLLKEAAAAAAESSVIDREDTHGNTAVHIGCMLGHRECVKLLLEHGASVQSGNNLGWCSFHEAISYGDRKTIRMMLIALKKQSSGQLKSRLPLLGEHFSKLADFYMETKWEFSSWIPLLSRILPSDTFKIYKKGHRLRFDFSLVDFNNNGPLPKWERGDVSLLLDILSTDGRKAVLMDNRKKVYQVLREKDQNLSDE

SEQ ID NO: 161207 - protein, 131 aa, Heterodera glycines
  unsure (1)..(131): unsure at all Xaa locations
RCVQRAGTYSERVDDSPLQGIPRSRTIIAMSDPNHGKFSPVYQPLSGKDKHADFASVARVQPRTSKGXHRPVKKQFRAAEHRKSLXEVVPTEAMSQLFSXARVSLVIGINQTNRSTNXERPCTTIHRIIKS

SEQ ID NO: 161208 - protein, 205 aa, Heterodera glycines
HPDPKQVLIIGGGDGGILREVLKHPSVERAVMCEIDEMVVQVAKKFLHGLATSFDSPKLQLHIGDGFEFLKGHEAEFDVIITDSSDPIGPAESLFGKSYYQLVRNALNEDGVLASQAESIWLHLPLISKLMNCARDLFPSVAYASATVPTYPSGTIGYLLASKRQMHVLSVPLRPLNDSECQSMGLKFYNRLLHSASFVLPNFAE

SEQ ID NO: 161209 - protein, 214 aa, Heterodera glycines
MSSSKRKHQWHLLANVSDYSKSEKGFQSDEKLDDNDLEVAMINESCLFGDTVFQQQSAAFFALPSLLPFNNQTNIVSSFVSPFNEEQNSDESDAAAKSIAYDVVSSLFDGEPLYSSESFSDDEGSMVVNASILQVLQDDETESELEQENTEATKENETAKSVSEESESIEFQPTVPTCNNSMPTLLSQMYAADEQTLPVFDSWEELGDSPVAAE

SEQ ID NO: 161210 - protein, 100 aa, Heterodera glycines
  unsure (1)..(100): unsure at all Xaa locations
YAKKRDVFFSALSIYWFMSRFLKRCVYPLVHHTKGPAHCCCRRWTIVCLLFRCPLTIPCPFQVSNLPYPAAPHFHLKADYEWHHSVAAVVGVGALRSEVX

SEQ ID NO: 161211 - protein, 188 aa, Heterodera glycines
TRSPTRAHPPTCRHILFGVNGAKKLPRRDKQQGADMDVDEHQPPWKKLSVNTVDNLTLPSCKVQMDWERGHGQALSTANDSTQNQSSSTTRQASDMENSVSDQFSHSQSESEASTSNIDADDEQSDWPGNELARHPQLSSSSSVIVPFQLAPPQQRVASSTNKQQKDAAPLSAEAIKRIECFLQSADD

SEQ ID NO: 161212 - protein, 94 aa, Heterodera glycines
TAANRRTSAERLQPPRASIGRVALSLAEKIFCGRRRNWAGEVRHLALETCQFTVDKANVRGKRPHGRHMRRTNRQKTKSLPPTHSFALECQRAD

SEQ ID NO: 161213 - protein, 227 aa, Heterodera glycines
  unsure (1)..(227): unsure at all Xaa locations
CNGPFVPLNLGNFCGGEEQTKNVDRNSGDHGEEKSHQPSGAVSALCAAVRSSSHLLDNSPSVPTTSSAVAFPPFGSSPTNGGVVGVSAVSVAQTSLSFVPSFGLLQQQSPIKQLLYTSSQNRHNQLVPSALPSASPGGLMPNQQNGIKSAASAVGGGHSAGVLPAEMNTHNQQQQREENGNNTLALLLQSLQTSILLEQQXKAFLSNSGTTHNNLGTLLNRLPSLNG

SEQ ID NO: 161214 - protein, 222 aa, Heterodera glycines
  unsure (1)..(222): unsure at all Xaa locations
MSAISRELANALHNNPNAPPPGGRILLCLSESDVTKKDLKANLDDFFDGNLKIEEMGAEELIEEAEKEAKAANCQQQFDGIICSNVFTGQKMVENRRKMAAVLGVFLRMLRGEGAVLILRENLEDFSAKLIADLTKFVDVFAAKWQNHTFGFRLYGMCQVQNSIFSHSNFLDVHWTLTKSEENRLSDDKLPTFREFLDKTHYTEDNVXSSKWIFGKDFISPG

SEQ ID NO: 161215 - protein, 166 aa, Heterodera glycines
  unsure (1)..(166): unsure at all Xaa locations
MAKLVAVALLXLTIAAMALAKTGKSQTADEAEGLRNMNLGDNNTVDAGKEPAADIVTKKGKAQKAGTKSAAATNEPAAAKGTKNGKAPKTKANQEEATNAPAGANEWNDQLMGMSAEKSNEELAVLLPKAHTFMENALSLINEQMEKNGVATGAAGDSSSTGIPAN

SEQ ID NO: 161216 - protein, 136 aa, Heterodera glycines
  unsure (1)..(136): unsure at all Xaa locations
MFSSSXLSALFLASSVLAVLIIGIKMDGPTEAKAAAPPNAAGPMGLLLLLNGKQSAANEKGKAPSGESKPNPGQKPSGERRKRDVLGHAGGYVGGWDHPIDSTLDWAKSQWNDANWLADVVNRNGWENTGTPTGGR

SEQ ID NO: 161217 - protein, 236 aa, Heterodera glycines
SFRFVQKKNMKLAFVRLNVLTVLCLFCSMGHSYGNPSDESDDEICEEEENEAQSEAEEAFYFFHNFNGTIQSEREEKRTVVEIFCRNTNDKFQFSTDDEGNFKIQMEAKIKWKFHKCTTGLRMAFYKKKVMENKVPKCLPIILRSPKRKLKNAKRLDICVVPIRIKWLKFGPKINAEEAETEENDEILRNEFALDFDVEKNAQMNGQIRNCSDLHSAEHNFEMIFNKYFDDGKSVD

SEQ ID NO: 161218 - protein, 190 aa, Heterodera glycines
MEAAASAVQSPVSLRGLSAPPAESQPQPMPLSMPNDSPSPSRRAPLLLENAVKIPAVDYDDQQPTTSCGQGTKSCSSDSGQGSSAGSEDSAEGIVVVSAVCSSPSPSFNGNSPLSAGTFKKKLVENWDFEDVAEWLASLGMGEYSKAFGRTTGRELLRFDRTRFTALGVTRIGHRQTMERSLQSFSRRSD

SEQ ID NO: 161219 - protein, 226 aa, Heterodera glycines
  unsure (1)..(226): unsure at all Xaa locations
VRTGLLDGXGSAEILLEKDASIRLTTDSAFEKSGTAINLYVDYKNITKVVTKGSRVYIDDGLLSLIVEEIFDDAILCKVENGGKLGSRKGVNLPGTPVDLPAVSEKDIKDLRFGVEQGVDIIFASFIRNANGIQTIREVLGEAGKNIKIIAKIENQEGVGNVDEIIAASDGVMVARGDLGIEIPAHKVFLAQKMMIAKCNMAGKPVITATQMLESMVNKPRPTRAR

SEQ ID NO: 161220 - protein, 60 aa, Heterodera glycines
KESNAHETRPSCEGILISFEAGNRNSTCHDAALELPSSSQSNPKNNDSRSYLSLSSSSKI

SEQ ID NO: 161221 - protein, 60 aa, Heterodera glycines
RFPDASLHFAETFDRAISLLRADCRTSEKHVTFLHILRQLGASEENGGLLGNLNGLILIL

SEQ ID NO: 161222 - protein, 71 aa, Heterodera glycines
QVSNEPVQIAKESTILFTRAQLSENVQKSDVFLRSTTVCAKQRNGAVESLGKMKRCVRETLGSSVKKEGNV

SEQ ID NO: 161223 - protein, 207 aa, Heterodera glycines
  unsure (1)..(207): unsure at all Xaa locations
CNKLTLQRHPFPLTIALSSCLTMXLYSLPLLRFLSISSVSVPTDYLLRIVLPIFXXRAXATVSAYFALWKISVSYTQTIKSTMPLFTVLISRLLLGERQPMRIYLSLLPIITGVFITTATELQFDSFGLCFSLLSTGILAFLNVLAKKVLDEARMHPINLLSLNSQLASLLLFPFWLFTDALKMWSNIHSTNRHNQSPDPRFLFMLL

SEQ ID NO: 161224 - protein, 99 aa, Heterodera glycines
PLLLFFRFLLWLLLLIFLLLLLFVLLVCQLLLLVVLLLFFLLLLVSLVLVFVFRHLLIFFPLLLLLLILFFHEMLYLFFVFLFKSSAYILDVFVVGSVL

SEQ ID NO: 161225 - protein, 164 aa, Heterodera glycines
MSSSSIFLSFASFSLIILALCRAQNESAAQGDAQPPPFLTEASQEKINEFYHYVTSLGHLKETEIAEKVKEWVDKQSEEIQKKYVEFEQERERAKAEGEAAHEEAVRKFSEAAKKADKELTEIANNPNLSANDKAEMISRKVQSLPKKVRDEIGGAMGGGGGGQ

SEQ ID NO: 161226 - protein, 34 aa, Heterodera glycines
SVERWPFHTEPPDHYDLLSHLLDLSVSQLSTLMP

SEQ ID NO: 161227 - protein, 185 aa, Heterodera glycines
  unsure (1)..(185): unsure at all Xaa locations
MRAILFLAXVCLVMAVILETANSKAVKKDNKKGAITTPAKGKAAPKGAAKGGIKKDAKSKGKGKKDAKGKKDKKAKPAKGKGVPKNDKKSPAAKANDKKSPTKPMAAVKAVPKAAENAQKGPSSAEVVAEENNLDTEAVDDLGAEESDFDQLAEDELLEDDAMDGEADEWEGMGEETEMDSQMAL

SEQ ID NO: 161228 - protein, 83 aa, Heterodera glycines
FFGWFNRTFNNSRDKYHVGVHHVIKRSGRWLIIYLVVIVAVGLLFVRLPKSFLPDEDQGLMFVIVQTPSGSTQETTAKTLANI

SEQ ID NO: 161229 - protein, 51 aa, Heterodera glycines
DLLQMPIQLSRTTLAERVYHPACGLYCYSNVWLIKVPFTFNSPISDHNDLA

SEQ ID NO: 161230 - protein, 63 aa, Heterodera glycines
ILIVLINTVCANQSIVNDIIKRLLQLFTQILVITDRTVECEWHFDQPKCRVTNQAKAGDEPAH

SEQ ID NO: 161231 - protein, 37 aa, Heterodera glycines
MDDVIASSVSMNQLSLQLVINLTNELPSFPFEHIVPS

SEQ ID NO: 161232 - protein, 57 aa, Heterodera glycines
RPLSLVATQEHSKETAGDKPEEGGDDVKSSWPLWVGLHTSYNGRNRGLPTREGELIP

SEQ ID NO: 161233 - protein, 58 aa, Heterodera glycines
KDLACLGFSADLVMQSFCTTAAYPKPVDVKMHRELPAFISNRGGVALRPGDGVIHSWL

SEQ ID NO: 161234 - protein, 128 aa, Heterodera glycines
MVYVEYCFDVRLDDFNEEYCFEVSNADIVHNSCLYVEQTNPNYMTFHGVFYYIFVCEKTISGLKDDRSENVFNRRQGACASGDDRCDNVFNRGQVASARNGEGRDSILIQGLAFVIVKVVNAVYDMIV

SEQ ID NO: 161235 - protein, 124 aa, Heterodera glycines
VADIDRERVLSLDDDLGKVKTELTVHARENRQLNLFFSDWRRVRENTRWNSKTGGSTMERAKRYIDQENRPEKDARSTLLKLADMFESPIPTTSNVARLRIQFDDDDNDADDNHRPDTASIDSP

SEQ ID NO: 161236 - protein, 94 aa, Heterodera glycines
  unsure (1)..(94): unsure at all Xaa locations
WECHTHYHLALVQHRLVVTAARASYLPDTVGAVATDRINAHGRNACGQWPSHGTHRSMAPPPSSVQFPMGAXNQLKKMTAHXHQLAEKMPVNES

SEQ ID NO: 161237 - protein, 148 aa, Heterodera glycines
MSSSDKLQQQKVLTVDTINPNVITMEYAVRGPIVIRAVELEKQLAKESLPFPSAIRANIGDAHAMGQTPITFIRQVIAGITEPALIKQQPNLFPEDVQRKVASLLRACGGGSAGAYTQSTGIDLIRQHVAQFVERRDGFPCDPESVCI

SEQ ID NO: 161238 - protein, 196 aa, Heterodera glycines
  unsure (1)..(196): unsure at all Xaa locations
MTAARLLKMVPSESALLVCDMQEKFREHIKFFPQILQVTCRLIEAAKLLDMKILATEQNPNGXGHTVPEIVLKKHDIPFSEKTKFSMCVPDLQRELGLSPAVRSLLLCGIEAHVCVYQSAIDFQQQGFNVHVVVDASSSRSMVDRIYAYKQLEKVGINLITSECAILGLVGDSAHPKFREVQKLIRESAPDTGLIS

SEQ ID NO: 161239 - protein, 206 aa, Heterodera glycines
TQSAKASEPAQQNAKASEPAIQQQNAKASEAAEQNAKASELAQQSAKASEPVQQNAKASEPAIQQQKANAQQNAKASEPAIQQQKANAQQNAKASEPAIQQQNAKASEAAEQNAKASELAQQSAKASEPVQQNAKASEPAIQQQNANAQQNAKMENITSKDAPNVKSDNSINKQSMNGSDTNEKNAMETKFVVPSSIESRVIEPVR

SEQ ID NO: 161240 - protein, 158 aa, Heterodera glycines
  unsure (1)..(158): unsure at all Xaa locations
MASSFCSSLISIAVIVCLLRKCCFSAPHPCCPGSQHVVSMMKDHTGSFSASMPKSSLCLSAERVAAAVENXQLKTIWCPGNGGQTLINEINAAQSSSDECARSLGFVRAMFXIVASAASHVRANAELANLAVQFPEQRCTIDTYCAALGLYVGQIPLC

SEQ ID NO: 161241 - protein, 238 aa, Heterodera glycines
  unsure (1)..(238): unsure at all Xaa locations
QVDTSEDTGIKTLWVGQLSWNVDXDWLKSEFEQYGTVLDARVQYDRDSGRSRGFGYVDFASSAEALRASKEAHGKELDGRALRVDLQPPRGPQERVESRAKHFKDELSAPSNTLFIGGLAWALTEDDVWNAFAEFGEVAGVRLPKEIESGRPKGFGYVEFTSEENAAKALEAMNGQALGGRPIRIDFAGKRDNSNSSRGAPRGGNTGRPRDSGWGGRAGGARSASGSARSGAIAPSTG

SEQ ID NO: 161242 - protein, 158 aa, Heterodera glycines
RKSLWGIVTRENERSNDLTDQLKPWDVPIFQVPSIQKQGSFSCRSSLSGYDSAQWVDSTDAAISHRPPPRPPPPKLCQTTSEVTSPRRHFHQSHRHSVELVDENLQLVKSVGRGVLPDSVNPQLMQNAASVSKTDFKQKVVLDLLNTERAYLFDLNTW

SEQ ID NO: 161243 - protein, 69 aa, Heterodera glycines
LSQQGRRGELGKASNSQNSVARRVSLKQMRKGHCSCSSSSPPSSPSASSSSSSPIHHHRHRLFIVFLII

SEQ ID NO: 161244 - protein, 71 aa, Heterodera glycines; identical to SEQ ID NO: 161222

SEQ ID NO: 161245 - protein, 120 aa, Heterodera glycines
LFVYLHGSPEHFYVQNSAGKEWRSTKLFDGATDGHAICTFGMEEFALSGVHELVVFVNMHGVSSRPPISVSGRSRIVGLSLKEPFLHVLSEDGTVSIFSTVDAHLVQSLAFPTDEVQEVR

SEQ ID NO: 161246 - protein, 146 aa, Heterodera glycines
IEASKGIGASGSFRLGGSGTPKTSDVKKSPKKRIAAKKPSVMKATPKKAKKAVPKKSPAAKKAKPTAAAKPEVPLPVSPAVTKSKTAKALKKDVPKKSKMAKRSPKIAKKSKTPKKATGGAKTSRKVKKVAASKSAKKDVGVDGAS

SEQ ID NO: 161247 - protein, 139 aa, Heterodera glycines
KKCQPFQIPLIVLLAVVSFRLSASTGDKKTANDGSGNNSSAGIGTKIKRIVTAGLLFTSLATGGAEAIGRSNAQGGNAAGLVPSHVTNRSMAPPPPPVQFEMGANRLEKMRAHLRELAEKMPVNESKRLSPSGPDPHHH

SEQ ID NO: 161248 - protein, 61 aa, Heterodera glycines
  unsure (1)..(61): unsure at all Xaa locations
RVKDLLRKLCRSKNRPLRLFIKNTALCVVTTSFNRIPPXPGPPPHWDRARENLRRRAQFAL

SEQ ID NO: 161249 - protein, 211 aa, Heterodera glycines
MTALHCHVVKSSLGPVGLDKMLVDDVGDVTVTNDGATILKLLEVEHPAGKILVDLAQLQDEEVGDGTTTVVIIAAELLKAADELVRKKIHPTNIINGYRLACKEAVRYMTENLSFPVEELDRASLIRAAKTSMSSKLIGSESDFFAELCVDATVAVKRTDKAGRVSYPINSVNVLKAHGKSSKESQLISGYALNCSAVLTKSYRLAFQTTN

SEQ ID NO: 161250 - protein, 224 aa, Heterodera glycines
  unsure (1)..(224): unsure at all Xaa locations
MDSLKGRSLRLVLKNVRVYARMSPKQKERAINALKAMGLTTLMCGDGTNDVGALKHAEVGVALLTHPLKPEEATAATSAGSGTPTQSTSGTSGRQQQNEGGGGEQTRRYNNREPTSADANGQRQQQQQLAMTTAGGGGTSSRQQQMQGRLNQMMRDLEDQEEQAKVRLGDASYAAPFTSKSTSIQSXCNIIKQGRCTLVTTLXMFKILALNALVLAYSQSVLYL

SEQ ID NO: 161251 - protein, 218 aa, Heterodera glycines
MLFSPSTVLLLLLIVLPFSLSFILIPQNVRQISPALSSRPFRRFGHFSVIAKRNPIVLIPGDGGSRLKANLTGKPSVVHYFCQRQTNDFFALWLDLQQFGPFVIDCWADNMRLNFNRTSGRAQDLEGVKVRVPGFGHTRTVEWIDSSKRSPSRYFAPIVASLAKLGYQRGIDVIGAPYDWRRAPEELLHYFVKLRSLIEQLYHANGNRKVIVLAHSMG

SEQ ID NO: 161252 - protein, 237 aa, Heterodera glycines
VNRRQRLWRAELSPKFQSYDEAIKWRMMGVNHVRHSTKAKKVLGKTRFLDLDLPESFDARQRWNFCPSISLIRDQSSCGSCWAFGAVEAMSDRTCIASGGNIRIALSADDLLSCCHKCGFGCDGGEPLQAWRYWVKEGIVTGSNFTAHGGCRPYPFPPCEHHSNKTHYEPCKHELYPTPKCERKCQTSYNKREYKEDKFYGKSAYAIDNSVKAIQNELFVNGPIEVAFEVYEDFLNY

SEQ ID NO: 161253 - protein, 155 aa, Heterodera glycines
MKSFHLSIVVTLCLLISCLTPSSFGYDDDDLFDIGTAQSVAVTGILTCNGRPSGGTKVKLYDVDTFDPDDLMAEGFTDEKGHFLLEGFETEISDIDPKLNIYHNCNDEHFPCLQKFSIEVPDNYITEGKRPQKIFDIGKLNLEGKFSGQHRDCIN

SEQ ID NO: 161254 - protein, 110 aa, Heterodera glycines
  unsure (1)..(110): unsure at all Xaa locations
IFHKVDCILTSGGTGFSKRDVTPEATKEVIERECPGIAVALLKKGLXITPFAALTRLTAGIAANCLIINLPGSPKAVREGFEVIEPILSHAIAIVKGDESETSVLHKRTA

SEQ ID NO: 161255 - protein, 36 aa, Heterodera glycines
DCIPTNHMSVEVYNDDVPSGAFALLYIILGRGGRYP

SEQ ID NO: 161256 - protein, 167 aa, Heterodera glycines
KGAAWLSTVRYDCASTSDSSGSYSQCGTPPMADAMQQQRTALTTERGGLNYVIWWHRWRTGACPLPPPLPLHPDIILTDHPKLLITSQMPSHNNHQGPPVLRWRSNAGKMAKTAAERDSTSAHAGSVVRLHRPPQASPHDPRPISLTPPTTNCLRALSFRFGRAFST

SEQ ID NO: 161257 - protein, 169 aa, Heterodera glycines
VVEYLYMTFSWMMGVFVFALLLGQIRDIVSNANKNNEEFRTTMDKALSECKRLDLPEHLTARVRSWFLYTWERQRTLEEKKLVEKLPLKLQTDLALSVHYSTLGKVKLFQDADRAFLRDLVLRLRPAIFLPGDMICRKGDVGKEMYIVNNGILEVVGGEHNELVFATLA

SEQ ID NO: 161258 - protein, 260 aa, Heterodera glycines
WWTAPELLRENNRTGTKEGDVFSFTIIYVEMVNRETVWNGTERDDDVDEILYRLKRTNNTIPHRPQLRPREDTNQSLVHLIRDYWAEVPAERPRMDMVRTMLKQMVQDGNQNLMDYVFGMLEQYASSLEQEVEERTKELVEERTKELVEEKRKSDILLNRMLPRQVADKLKLGEAVEPESFQMATIFFSDVVSFTTLAGKCTPLQVVNLLNGLYTAFDGIIDTHDCYKIETIGDGYLVCSGIPKRNGDQHAKEIAELSFA

SEQ ID NO: 161259 - protein, 156 aa, Heterodera glycines
  unsure (1)..(156): unsure at all Xaa locations
IDEIDAIGTKRYDSNSGGEREIQRTMLELLNQLDGFDSRGDVKVLMATNRIDSLDPVLXRPGRIDRKIEFPLPDEKTKRRIFHIHTARMQLENVDLEEFIAAKDDLSGADIKAMCTEAGLLALRERRMKVTMDDMRKAKENVLYRKKDNAPETMYL

SEQ ID NO: 161260 - protein, 37 aa, Heterodera glycines
SDPTSSAITHLFAKLFDDTIHPGIRDTQIEDALLRKR

SEQ ID NO: 161261 - protein, 179 aa, Heterodera glycines
MAMETLGGGEERNKMETEMDVSVGEESPHQQRFLEECLNLSQKFLKEMSKDEEQQQNVINGEANDGKSDVAKELLICHSSSPTASPQPSGCFLTSANVVAESDGILREQNRSGEADGQSTAATTPNASRRPSNSSAAAVSGSVEDELAKIKVVLRQHERRIRLLEDQLADANMANAYGL

SEQ ID NO: 161262 - protein, 206 aa, Heterodera glycines
  unsure (1)..(206): unsure at all Xaa locations
MYEQYGGQKQMRRTENDKNTEQCQRNAQRNIGERMPTMDDNNDQQPSMLRRMPLQSMENASLLKSSEFSSSEHFSACKKEPIEQSEVIAPKNRLGPPAHWRVEETEKRQKRSAKRAPLPRQTTYQIDEHGRQVVVVRNDDSYRSNDEDDERTENAERGVPPIARNGFVKPAYSYSCLIGLSLKNSDTGELTVSEIYAFLCYHFPYX

SEQ ID NO: 161263 - protein, 43 aa, Heterodera glycines
RTGCLSPYDELAVTRPGRVKFEKGEPFCLSIWSSTRRSSSSSR

SEQ ID NO: 161264 - protein, 66 aa, Heterodera glycines
VPQRAQPLSLVATQEHSKETAGDKPEEGGDDVKSSWPLWVGLHTSYNGRNRGLPTREGELIPENRS

SEQ ID NO: 161265 - protein, 222 aa, Heterodera glycines
LLMLFPRPSAGVGMDFGPYLKLTAIFIVLSTFGLGLSLAHMKKMLQIGKELAKQNETTKTASATFVGQDNLRTLRAFTGCQAGLSVLSIYVAASLAFMKFWYVRTHLVQEFSCSLMAITLAVVQFFVLRMANGGGLLLIKGIVLANACQIVQELNMSLSAFYTFFYAGRIYDAVEERTSFFTGPESAHVRFALSRVQHAKTFLFLSLLFHVGRMLFNAFVLW

SEQ ID NO: 161266 - protein, 106 aa, Heterodera glycines; identical to SEQ ID NO: 160287

SEQ ID NO: 161267 - protein, 44 aa, Heterodera glycines; identical to SEQ ID NO: 160340

SEQ ID NO: 161268 - protein, 229 aa, Heterodera glycines
  unsure (1)..(229): unsure at all Xaa locations
YRGRYVXLAEVAMNGRKNRLFMSMRICKNIKELLGKFEGHVPASEEVNGKAENVTIQSESIVTERLLYYIDLRENRRGSFLRITQLETHSGIRNSVALPFEGIGQLHDALDSILEEYGEGFIEEEAELPHSQMIRTDGKSFFFDPGHNSRGDFLKITELKSFMGVRNSVVLSIRAIPQFTQVLSKLYDDFQELRAVEEVNVNNVLKKEAEEAITDSNEESPKKETKSTD

SEQ ID NO: 161269 - protein, 193 aa, Heterodera glycines
  unsure (1)..(193): unsure at all Xaa locations
SPALTVPTSRAAAYFGMFAVHPFFQXSGLGKRLLTVAERYARIVWGSDEMHLDVGWSLAELKLGMGRLQRYYKRRGFLSTGILRPFNGAVARFITVDRNDLWIELMVKDIRGALDDIGGDPEKRMKRVNSRGRLAREADKDDGGRDPQKRMERVRSFGRLTIEADRDDIGRDAQKKMERVRSLGRLAREADKS

SEQ ID NO: 161270 - protein, 161 aa, Heterodera glycines
  unsure (1)..(161): unsure at all Xaa locations
RRRKPWQTDGTIGAQKAVPKTVSATPNSGLGHKIDSQDAKRWRHKXESCNWATGXRYQRKHFGPGQKRRVSFGPQSESNDSATRKHKMPKVEVSTEQMTTPKAGQQKCQTKMNGSASSGKAINGPQKKLAEEQNRAPPQRSNMPKSGGNANIGGGADPTPI

SEQ ID NO: 161271 - protein, 104 aa, Heterodera glycines
  unsure (1)..(104): unsure at all Xaa locations
VPLELYKVSLANKSKHPIGVVAGGEMGKRNTQTENNRFDQAEKAKAKAXLKGFTPKGQGNAHLLGLAQHSVNRPFRRVAFPLPQQTWQSALFALYLARVPIMRQ

SEQ ID NO: 161272 - protein, 213 aa, Heterodera glycines
MAIPLLGEGSVGSAKSSPRKAKAAEGGGTLWRKHSPAMVLRRRKTSSASLRTSASTDVLQISQMQKELDESEVRPSSIGKIFRFNTGNWHLAFVGLIGCSISGLAVPFFALVYAQIFSVFSEPLDQLQSDALFWAAMFLLVGFLNAFGFFISANMLGRSGEALTKKLRTEAFRNLMRQDTAFFDDERHSTGKLCTRFATDTPNVRYVFTRLMV

SEQ ID NO: 161273 - protein, 233 aa, Heterodera glycines
  unsure (1)..(233): unsure at all Xaa locations
PNGLTILLLISVVIGHSLANLGPTIKHNPHFKAVQTAHHLHDAIAKKHEAEVTQIICFFSNEQRQALALEFKKQFGTDLIAMLKKEFKSDFEELIISLMQTPAVYDANQMRAALSGSNEAVLIEILATRTNRQITALKQAYERLDRRHQHNQLEEDIKAKTKXTLPKSVGVFAQLLSRRKXPASIVLAHDEAMKLFREGEGRRGVNAVVFNQVLATRSFAQLRETFEFYRQAT

SEQ ID NO: 161274 - protein, 105 aa, Heterodera glycines
TECMSCSMISAAVTRYRALVGSSTSSIKCSPACRSSVWSASRSSACPVASPLGCAAWPRSASCFARRPGRCKKKKLVSLLWAGLSAGLAGVALFFCGAGVMFGAV

SEQ ID NO: 161275 - protein, 105 aa, Heterodera glycines
MKCRRMEEQPDEIRQQAITEFIGGCPPEFTQILAHIDGLQLEDRPNYEMIETMLREHLTRSRVPEHPYDWEVGRRNAMAQAQSEAARRKKDNTKEGGGGKNNTQG

SEQ ID NO: 161276 - protein, 60 aa, Heterodera glycines
IRFSMLHTQKNEDGIKQFFQEIYEMYIKFSMNPFYRQDTPIRSPSFEQKAAMYGRKFLGV

SEQ ID NO: 161277 - protein, 195 aa, Heterodera glycines
  unsure (1)..(195): unsure at all Xaa locations
SENGRGTKGRXQSPVPRPXLTEAADNVNKAVDDLSXLNRQKHXKNAAEATAEKTPEEXGKSIERSGRKRRKRTAEDGCQQNFGGKSEKRRGIGKRSENENGNTFXGQQKGQRRVDFDNXRQKDDFGREGEADGRADSQNVGQHEEGAESEQQCRRRRLRQVVLRRRRAGGGHGGQSMINQSDRRIRHCCVMKCSQ

SEQ ID NO: 161278 - protein, 238 aa, Heterodera glycines
  unsure (1)..(238): unsure at all Xaa locations
VKSFFAGALKKVQILKDTFLLHSRQKMLLLNRHEETMKMLAAQEPPDEFFEEFEVQTXMMGLAIGSQGANISSVRKLEGVKEILVDDSQRAQGFCKIKIYAINPEIAEQARNMLEFLQKHVKVPHDKVGQMIGKQGKSIQDIVDKSGVVRVQIGEENPEHGLVDFTFTGTRESIGNAELMVEFLLKHIKEMDEIXEEEEECKRKLFNSRHSPFTYPNSGWQSHQQLNASQRASINGGG

SEQ ID NO: 161279 - protein, 96 aa, Heterodera glycines
KWLNWLLLIQLSRVSWVFISTDFSHGSLLVGCPSRAFGVVRWWLRSAQMRAATPLLGRTSVGLRWPISWWFRQSGVMTQFERQLKRCSAQWGSPSQ

SEQ ID NO: 161280 - protein, 231 aa, Heterodera glycines
LSRPLLFIAALLFLFGCCRADGNVVHLSSLNCATKDGGIDGFKAVDDGLILDSSSVTADSSDLPLIGFQKNGKEDLIFKLFVRDGGCVSKANFFTNGQPCTLGESEDVTESDKCPGEGGTSSCTSHEVTCTGIGMAKVAEESNGHAFKANLDNLTKLTNPCAQWKAHFGGVHQVLNGSSSGEKCASARFPVWIIAEIVIIALFVIGGAVTAEVVIRQRQAAAQPTLETPAP

SEQ ID NO: 161281 - protein, 200 aa, Heterodera glycines
MNFLNEQIREYSERTKDREEFKGIIEARNKLETAIKPLHGVMESDMASSSLETSMTNSANIARQALEELPVKQVRQMEQIAEEGKSKTVEEQERALREYAEKNSESVKKAVDQVSVAKDRADIALETYLRSHADTFSQEARKANDQMLFVMKDKKLNSEDKVRLEEWANTLPENVRGELRVRDLRELKQLVHLYNGLTPL

SEQ ID NO: 161282 - protein, 96 aa, Heterodera glycines; identical to SEQ ID NO: 160378

SEQ ID NO: 161283 - protein, 94 aa, Heterodera glycines
DCENIRVIDWIVRRLDNTANIGIESAIGTIPTRESMHLEGLGNIDWDQLMSLPADYWHEDAKEVRKFLEEQVGTDLPEQILSELEQQEKRIMAL

SEQ ID NO: 161284 - protein, 252 aa, Heterodera glycines
QNPLPTKYSDYDAFISFTSIKMSSLFSAFLPFFRLFLIFLFITENVRILDCVLLNILPMFRDSIDVLFLNTIAFRRLRQLAPSLLSDCPSLRSVSFNDAILPAFPPDDSANASDGQAVAKWLFTPRPDGLPKELQCSANAPVGQWSSTMEQIKAAFSNASSPVPFCIHFWSSSPPDSVVLFDRINEVTGEELALQQDNAHDCCLFRLPIGWGTRKWDNVWEEMIARQNPIDIRIKDGGFDGRSSGRPFSRAN

SEQ ID NO: 161285 - protein, 248 aa, Heterodera glycines
MLADEDGAGDSSSAVAPVAEQQLPVLIGMRGQRMETDSFPSGWGRVETDTLDTFFDSSWYYLRYLDPHNSNAPFDPDIVSKHMPVDIYIGGMEHAKVHLFYARFIYHFLHELGMVPSREPFAHFIQLGVVRAPTYKLPDGRYVPDSEVDGNKKLPNSRLVHKGSGQAVQKEFEKMSKSKHNGVDPMGVIDSYGLDETRMQLLIEARPNYQIDWPYPYPTFQLKTINRWVACANSGGQLCDRTPTGIVN

SEQ ID NO: 161286 - protein, 240 aa, Heterodera glycines
  unsure (1)..(240): unsure at all Xaa locations
MITPDFGCSGWTFSQNLDRKQQIFQWKSRRIANWSVKIIPTVIAHDSSACVTFNPAKLPGALGLRPMMVGGFPIDIKIAPWTVLFKGFKFKGIRKGKSVELYGTCASTFISPEFVLLAAHCFDNVTEGNPFYLVHNSNASNLSSSKKSKKVITSHRHDQKNVFLHPKYDPVSDQSESQFHDMALIKLSRPMARVQPICFHCAKVDRFRNGTAYVMGWGXETNDCVGLTRPAKMLNGRPVK

SEQ ID NO: 161287 - protein, 148 aa, Heterodera glycines
TIMIISNSYNYYDAFLPPNVDNQIAFFNEHGMSINPLLQQQLSVENESSGTCLAKSSNMMGHQQQRLATHANSLTLAKLATNANQMMGSQHGLTTHAENKSGQSNRRKATACAYNSAAQKVEMKRQSARKPKKSRKPPPFVVPVDKTN

SEQ ID NO: 161288 - protein, 41 aa, Heterodera glycines
AGGKRGFPCRNHRRKDVRTFVEPSNVILFKTRVNANGRANH

SEQ ID NO: 161289 - protein, 260 aa, Heterodera glycines
PLRNFPFLPAEKKSTAYRERIESLPKVHQSTLKKLLGHLQEIVSHEDRNLASLENISKVFGPTLFNVSNAEEEISLELYNTATKQAIVTRDLIFYYCDIFGVDAEQLLAKCRMDVVREQKTSKNPANGLLIPVHLFERDNKCFNVQSEWTASQVVQFKVQKLAFVSPCENYALFEMIKKGQLERRIGANESLRSIVLGRWMTDGQKDNFLLLKKDPHPFQPQSGRAFAEDLKLAEPGSRTFKTASLRIEDGVHVCHHSRM

SEQ ID NO: 161290 - protein, 192 aa, Heterodera glycines
  unsure (1)..(192): unsure at all Xaa locations
MGQINLCDDVWLDTLAWINRGEVGMKFALVNARFNTLVDRHFEQRKWCFGEFHICERMTEESGAEIMTSIDGTDFSTLPLPTTPLPDSVVGFQSISIWYINEEVINFLCTIRRLLAEDIALEFSTYFTEYRSWKVMARHIWPLLRDGISTLFLKKCDXGHAPXNTCRPPCCXDCAGLHRIHTQMLPECPSAD

SEQ ID NO: 161291 - protein, 232 aa, Heterodera glycines
GGPNGGPANALVLRTIAQTEARRKRIGHFGVRDSRRQSRKRKKFESPQAVPPAANTDFIQTARGAIRRQSLRDRSGMTLARLDSQREGSDLIRSWSKEDVSNEEMSAHHFGNGGPSTSHQPTANQQRRDSPPKRMPKQSQQKQKQMSPDEWLKKLEAESGGLRDEEEEQAEKDVLKGSAGESMRKGAKAQKGNGVIRRDQQQQQQHDMNGMNLKGSLGGQNRRRKKSCCCII

SEQ ID NO: 161292 - protein, 32 aa, Heterodera glycines
ATPPGGFGRKHVFIKLFPLSIDLCVTEKKVAS

SEQ ID NO: 161293 - protein, 104 aa, Heterodera glycines
RRMELFMLCSRLFRQFYEIDHKISAEDRKKFFEKYCEVTTWMEHNAGAPSVEVTQKKEAFEHLYQSIIDGAVGQRLCRDNGLCGKDVIRQRSCYNRLCAWKFEE

SEQ ID NO: 161294 - protein, 44 aa, Heterodera glycines
RASESVDENRSVIVLHPSVPPRTELNSHSREKGCLQPTSAPAWA

SEQ ID NO: 161295 - protein, 179 aa, Heterodera glycines
MSSDESTTSSASVVSVQLREVPITDFKDVLPVLHKTLNELEHPFIKKAEEICGMEREKLFYITSSLVLLVLMLCPGNMLLSTVITVAYPMYASLLTLNTQNTSEYTQWLVYWCVCAEFCQFDYLFGSINGLLLLYVPLKTGFLLYLALPQTYGAHNLYVKHIRKVLAVTNVLDKMKKMF

SEQ ID NO: 161296 - protein, 141 aa, Heterodera glycines
LGLKCWSCERCNYFHLSRTCGYQQFHDVVSGHLTGQALELFNNLWSIRHNDQDTRLDECQESRAALNATGRDHVLDLLVPIPPPSIVGPPPSGCFPRPPYSKPFGGGFGPKSGGATIPGRGGPQTPERRNNIGTEEGEEKK

SEQ ID NO: 161297 - protein, 289 aa, Heterodera glycines
RSDDLAHRQRRSTIDDHSTRWSKSARRLLPIHERGSPCDAPESVQKAQSSDNKSDQSENNSNDKQQHVDEQLEKLPRMDEQQKDDEIVLVGSANVCVVLPEEAGNEHNCQKTAEQPNDALENDIDKKVTDFQTMVETTEEDNRSGTATFESFGNSAEPTPMETTIYHSAKESSEIGTDNGLLSKMAESPPKVPPLTPPSILRKVNSPGGNGVKKIRRVQFKEDELGPGRIRFGRSFSASPYPKQLLEHLDQSTSEGAASPSAGHESPAKRPMKAFRQNLPIASAGRPST

SEQ ID NO: 161298 - protein, 104 aa, Heterodera glycines
LPVRSDKYSAITRSRALCLDSSTNVPMLMFGESHITFSDSFLYRFITFSRRLFCYLLHFSLQMPTLQHPKQMVIPKQAAPNCRQCPIALGRELQRIGYPLSGGR

SEQ ID NO: 161299 - protein, 86 aa, Heterodera glycines
  unsure (1)..(86): unsure at all Xaa locations
AAEKEEKKSESKEAEKKENEEQKPAGKKEKRAAEKEEKKSESKEAEKKENEEQKPAGKNEXLAAEKEEKKSESKEAGKKKKKKKKK

SEQ ID NO: 161300 - protein, 253 aa, Heterodera glycines
MLQTHKRAPPALAHIMAHHSPHLPVGSELSPAKSLDSHHQRQMPLFAEKKYGQNHQSPHMSPIKLSNGNVSPPQSPSHRLQQIIKRHSQTKDLSREKVQRQQQSPLLQHPSIRALIGLPNSPADDQNPPPPFTPEQHALLMDTVLRPPSGLPFESPRSAPSPLELSEEQRDKLIDAIQGRPQPGLPFEDEAEHEGLHPAHRVNSAHLEHVLDAIFRKPPGLPFEDDEEEEHSSTNMHHSIAGYETKLFKKDEC

SEQ ID NO: 161301 - protein, 138 aa, Heterodera glycines
MPNIFKILLIVLLAVVSFRLSASTGDKKTANDGSGNNSSAGIGTRIKRIVTAGLLFTSLATGGAEAIGRSNAQGGNAAGLVPSHVTNRSMAPPPPPVQFEMGANRLEKMRAHLRELAEKMPVNESKRLSPSGPDPHHH

SEQ ID NO: 161302 - protein, 78 aa, Heterodera glycines
LLHRIDQCRVHAGRKAFVQTTASCMESHVIQLGNCLLQNSLTMFGSPQYDERIAYSFPNIVPCNNSKSSSSRTLCIHS

SEQ ID NO: 161303 - protein, 168 aa, Heterodera glycines
  unsure (1)..(168): unsure at all Xaa locations
SLFSFFFFFFCFWVGGAPPSPLFLLFIKKXXGGGGGXPPPPPNTRRGVFFSPPRVFFIFGGAPLFLFFFFFFFGPPFWGPPPPLFFFYLIFXXPLFPPPPLFLCFSPPKGEARXPPLPTPXKFFLXXXFRPFXLSHFFSXGRVLFXXCLFFXFXXXPFWXXXPQPPQX

SEQ ID NO: 161304 - protein, 235 aa, Heterodera glycines
WKMGLVDHLLALGPGLSDPISGTHRYLEEVAISACEQLAAGTLKINRERPLMERIQNALLTRKPLLDAVVMRMARDKVMKQTHGNYPAPLRILDVVRTGLVDGQQEGYEEETKEFGYLTQTTQSEALIGLFKGQTECKKNKHGEARKTERLGVIGAGLMGAGIANVSIDKGIHTTLVDTKQEALDRGLKQITAQMEGQLKRRKINAAEHAICLSKLKPVVDDYEQLRDSDVVIEA

SEQ ID NO: 161305 - protein, 110 aa, Heterodera glycines
MNNPQHAPPQPSPGAAPAGNTTTTYVYMADGGQPHWGPRPQNVFCSNCRQQVLTKVKYSAGLLTWLLFGGCLLFGCWLGCCLLPFCMDDCQDCEHYCTNCKAYMGQYKRL

SEQ ID NO: 161306 - protein, 85 aa, Heterodera glycines
LDDMCNDADTPVLLNDDIFRLSKYCSTEATLQISRATHVSLQNTHPTNALLMNENHSMALVNSIKHRMEMHTLGPSQHLYSCEAP

SEQ ID NO: 161307 - protein, 124 aa, Heterodera glycines
PASRASSTVWSQNHFADDVATRPQQKLPSLDLEGVAAFIREERPEIVFMVGAGVSTSAGIPDFRTPGTGLYDNLKQYDIPNPQAIFDINYFRRNPEPFFVLANALFHESIMPTSAHHFIRLVAD

SEQ ID NO: 161308 - protein, 30 aa, Heterodera glycines
LSVERWPFHTEPPDHYDLLSHLLDLSVSQL

SEQ ID NO: 161309 - protein, 33 aa, Heterodera glycines
FYTPTCFQRFVHYHLGNQSPQEVMVTPIMYHSN

SEQ ID NO: 161310 - protein, 104 aa, Heterodera glycines
LFAVFVLLMFAVSLAVVNSDLAINGQKYNRRKQQMEKQMDNNNNNNRKRRKKKLIRVQERHFFSRSFQSWMLNNWTNHGQAFSKTEQMEKDGEMRKGLFFDLNL

SEQ ID NO: 161311 - protein, 100 aa, Heterodera glycines
MKTNKRQKVSSSEEEFDPNQKDEDYDLLMDDEEREKFDKMTEKEREIEIYKRLEQREIMKTREKIKKKLEMAAGKKADGEVAARQKKAKAKNVRRIKRRR

SEQ ID NO: 161312 - protein, 227 aa, Heterodera glycines
  unsure (1)..(227): unsure at all Xaa locations
TVLLPSLHYEEILLFKLFQXVLAFVIVWQILSIEKLCGKFAEPKCFYPTEACDNFTIFKQNAETTELNADNETKWIQLNDLPTGEGCLPINISIVSTLRNGYNCGVSNQLKDTADALARVLYLCLLFLFALVFHTLAQQPSEEYDLFGYLCAAYSVLVLGFSTVTTILESVNWTTLWECTNFRPYQSFLLFLLLPSVILFCSVIYETFSNCSLLKESDAENAQKQTV

SEQ ID NO: 161313 - protein, 39 aa, Heterodera glycines
EARHFLQLKEGESDRKRRNLLITPLNWQMPSLRFPPPPL

SEQ ID NO: 161314 - protein, 184 aa, Heterodera glycines
MASSLTIEKRCKLFNTKQMECQFDGTEAGKCAFCVKLPCKFGAVNCAEEVSTSCVNPQELEKCCKARDNECCVCVLCEKNKVMKVLVECCGKRTETSAEAGKALCICVPKIGGGKCGGQVQVKQCDAKLVDECCAANTESGDCCCVCLSCNDQKCVVTVRCPAGEAKSTGPTCTASKCESVKCC

SEQ ID NO: 161315 - protein, 236 aa, Heterodera glycines
LPSGSAAFLRSLEHHCDWVNDIVLCSDGTRLISASSDTTVKVWHTRRNGACLSTLKTHKDCVRCLAYARWPTELVASAGLDKCIYLWDVNTLTKVTATNNTVTTSSLRGTKNSIYSLAMNECGTVIIAGSTENLLRVWDPRTCQKVAKLRGHNENIRAISVNRDGTLCLSGSSDGTVKLWSIGQQRCIGTIRCHSDSVWALQTDSVFATVFSGGRDHRVFRTPLRNLNDSELLFTE

SEQ ID NO: 161316 - protein, 157 aa, Heterodera glycines
  unsure (1)..(157): unsure at all Xaa locations
PFAAIESIPAAAWRPGACDVGPNSPYSESYYNSLAVVLQRRDWENPGVTQLNRLAAHPPFASWRNSEEARTDRPSQQLRSLNGEWXAPCSGALSAAGVVVTRSVTATLASALAPAPFAFFPSFLATFAGFPRQALNRGLPLGFRFSALRHLDPKKLD

SEQ ID NO: 161317 - protein, 60 aa, Heterodera glycines
QVSNEPVQIAKESTILFTRAQLSENVQKSDVFLRSTTVCAKQRNGAVESLGKMKRCVRET

SEQ ID NO: 161318 - protein, 67 aa, Heterodera glycines
PVFLRIHDKTESISSAVNPVYVLRMSISSDGKAVPQFSMHSSRIRSFNRGVVTLSYGRTVYICVVRA

SEQ ID NO: 161319 - protein, 57 aa, Heterodera glycines
ELIETSSLNHLKQERRCSSVTDFLLVYVACPLLVRIWLLWPRALAHQDCAGSKRKEQ

SEQ ID NO: 161320 - protein, 271 aa, Heterodera glycines
  unsure (1)..(271): unsure at all Xaa locations
GVNPRNTESVQYXFRGQKTAKVVGQLAINVPEDGSIVSGILVRRNFNYHLLHPNELSAYTDLANSRLSQRESVFYDGSFPLLLHNLRLLSSDAIVSNSDEASTSDKQQKESKNGGTPTYVVKMFRDEITINFYSVQHIVIVEWMSNPVNDLFADATLSAILHAQTNPILDKNVPKDFGAKAQQIEQNLESILVGTLCELCGDKSFVEVKEEENQGEKDAAAEESDKKEGKRRRVIQLELDGKEACICPVSLQITECEDQLLHHLFVFAHSK

SEQ ID NO: 161321 - protein, 224 aa, Heterodera glycines
MQGHADEMPKIPPMNAVLPNAEEILKSAEEMPEIEETPKKSVEEILFNLSEMPKGCLQKMQSLPKDMPGNTDEEPIVPPMNAVPPSAEEIPESVEEVPKKSAEEMLSNLDEMPNGSLQKMQSLPKYMPGNTDEVPKDLLQKMRSLPLNMQRHADEMPKIPPMNAALPNAEETLKSTEEMPESVEKTPKKSVEEILSNLSEMPKGSLQKMQSLPKDMPGNTDEVP

SEQ ID NO: 161322 - protein, 185 aa, Heterodera glycines
  unsure (1)..(185): unsure at all Xaa locations
MSTLFHLLTICLSLQSQRIDESIQSQLQDKYXGKELLRMANGDIDEFRNAFHAGCPKFLSPTTVVYDREQSXKEPLLRQCNAFLEGIESQITLPILRGYLKLYTTLPVQKLASFMDIPDSEIGLFHXKLLTYKMIVTELGKETIDQTEGADETTELDFYVDKDMILIADTKVARRVSEYFIRQIG

SEQ ID NO: 161323 - protein, 85 aa, Heterodera glycines
FFGWFNRTFNNSRDKYHVGVHHVIKRSGRWLIIYLVVIVAVGLLFVRLPKSFLPDEDQGLMFVIVQTPSGSTQETTAKTLANISD

SEQ ID NO: 161324 - protein, 203 aa, Heterodera glycines
TLDISHNHHHHHQQQQKQRTTKRMDQNRLSDFAWMETLAWLGRAEVGMKMALVNTRFNMLVDKQFMLRQWRFGEFHICGREGAQRGGAEIMTSEDGTNFITLPLPTTPMPSSVVGFQSLSIWFINADVIKFLRRIRRLFAEDIALEFSTRHTEFRSWQVIARHVWPLLRDGISMVCLRKCDLAMLRKHVSPTVLFDCPDLHRI

SEQ ID NO: 161325 - protein, 217 aa, Heterodera glycines
MSVGGKDKSRPVSSTAVAGTPWCVVWTGDNRVFFYNPSTRTSVWERPPELYNRPDVDLLVSKPPPSKEQKGAGKSKKRQKFESDNEEEEEGAVEEGESDTSETEQSPELQPTKKKSRKEKKAEKEREKLKLEQQQQQQLQQKQPKQPLPIQVEKPIDPAIQAELDAQKEREKVPLEERIKQFRQLLEDKKVSATSSWEKELSKIVFDQRYLLLSTVE

SEQ ID NO: 161326 - protein, 87 aa, Heterodera glycines
LLLLSVGLCFAQFDQSPSAALNHVRAKRGYKPWKKQSFSSSSSEMYRRRRPSGNGHYRDYNGYGSFGYYRRKPGILERALGKITRSY

SEQ ID NO: 161327 - protein, 255 aa, Heterodera glycines
LFAVYVLISVIFTCHLCKRRNPITFESIDHLEAHFAQQHFQCLPYVCEQCPQFASGLYPTEGAIIEHMKLVHGSESEFEFKIIIREDTEEKRAKVRAALEHCVRNSGDVATSSSAATTTSNNDSTAIELPQTQQQVQTTHQPRVVQVVPAPTVVVRTEVVQQTAEKHSGANNTSNGAALAEGGGSGTTTTNTSRTNRTSSGGNKRNASEAVGAGKGPPVWKIPKKSTSKKGSDGAGKPSRESHNNRESHTTNSRI

SEQ ID NO: 161328 - protein, 130 aa, Heterodera glycines
QLVAFCVEVLVNEKRLSLNGWFHYAPGTANVAQTGPNCAVEEPICRVEPSMNITLAEVNEWLSPNYIRPGQHRQIKRIFAYKSELSLQQFLNNERYNKALDELEKAQFESVGPPHKRNVWRLVESSLGQN

SEQ ID NO: 161329 - protein, 127 aa, Heterodera glycines
  unsure (1)..(127): unsure at all Xaa locations
PPPPXPPFXTPVGGKQTHFLGPRKNTPKEPTQXPPQKKTPPGKGPLREPLPPSSPKLSIRSFDANTNIQLGIIMAIPPTNRDRPLFSVVSNACPTVRSAQLTNFSGAALKKPRPPLSRAESTVHILI

SEQ ID NO: 161330 - protein, 70 aa, Heterodera glycines
STHLIYPLALSMTLKTAGLRPWLSRSHPGWAKLVQVSFVRLSPYRFLCISRPFFQSSQFPSVQSRHCSFN

SEQ ID NO: 161331 - protein, 44 aa, Heterodera glycines
TADASPAHASAESTANAMLTNSDTLPIRPIVHSLAFHFPFFHCP

SEQ ID NO: 161332 - protein, 185 aa, Heterodera glycines; identical to SEQ ID NO: 158767

SEQ ID NO: 161333 - protein, 52 aa, Heterodera glycines; identical to SEQ ID NO: 160771

SEQ ID NO: 161334 - protein, 78 aa, Heterodera glycines
WETLHYDWSDCARPIRRISCSELMQVVSSAAVPGVTFAELFAPIDVEDQFRAVPVSGSERHGQRVLDQAVSACGLHAP

SEQ ID NO: 161335 - protein, 85 aa, Heterodera glycines
  unsure (1)..(85): unsure at all Xaa locations
XVMPLHVRSCTRATLAKSAXCPSPKGVGKPVKICRDWDRTLQLLSVNEEFLVGASHQLALNTSLPFVHTARRCPGLSHFEKFGDG

SEQ ID NO: 161336 - protein, 27 aa, Heterodera glycines
  unsure (1)..(27): unsure at all Xaa locations
NTHLAHQCRFAVRSSIAEXLVAFPEAG

SEQ ID NO: 161337 - protein, 257 aa, Heterodera glycines
  unsure (1)..(257): unsure at all Xaa locations
IFCESLGYLSEQFFCNAHKVFLLFPNSSMPFLVXKFFLIFSKWKWPMPVQLTPIDHKFFGTFLKQQNEIEKAMKSIRKELAMAVIMPTIGGRNLAEKVNISSAKVVKNELKRACDKLRSKMETKDEAIAFTEKYEHFIVIECKGSSHNVDKFCDFVGKRLRYELLEFVENPLAIWVDFCHVRPKMIGPTECPSADLEKNGNSIGLRHWLVGIQMAAEQKANSAFKRLRGHLREELDVKIKGDFEKGSHNVQLKSEFA

SEQ ID NO: 161338 - protein, 252 aa, Heterodera glycines
GLPIGNPAGNTPEKWDMNQVVPPISLSTTYKQNWPGMPKGHDYIREGNPTRDVLQESIATLESARHCRIFSSGLAAIAAVSHLLNSGQHVIVSGDCNGGTKNYFDKICVPHHGLELSFVDLTRLENLENEFKPNTKMVLFETPSNPLLKIVDIEAVCRMVRARSKDCVVVVDNTFMTPYFQRPLELGADVTVQSLTKYINGHTDVLMGTVVTNKEQLDQHIYAQQIYAGAVPSAFDAFLVLRGIKTLPLRMR

SEQ ID NO: 161339 - protein, 255 aa, Heterodera glycines
  unsure (1)..(255): unsure at all Xaa locations
PKTKMAHKRKRQTGCAVFITNSDLVDQCSFPLDQLPLNTLVIIASQLPFKDFKRVGMISKQFNRAQRMTRFSRKHVSVDLLRKLFPDEVPDTDVDNSNNDGTERSVGMLEVMDPLRQHLRSSPPRNIREVDMSKFSTFRESHFVELFRSISNGRELFTEVRRLNVQKCVIELRDMEFLAQLMPKVWYIRCSAQTLVIPEDIDQSKLALSVEQMRQLHAKLDKFDYVARKCTKKHLWFISKLTELFAXARIIQLDK

SEQ ID NO: 161340 - protein, 183 aa, Heterodera glycines
MTSPIAYDQLREMTRNFLSKGVSAVETNAIFQGKFGTENSPTLCTIYKWRREHRGGMGEREANDQNLEENEKEKERAADDGGEKGAKPYKKDCDKYCVPCNRELSSRHYYELHMLKIHNIFVGDSKALYELLESFGPKREKKIIYRCDECFGGELDYELLEDLRRHRLLEHGKKMREKFDSPA

SEQ ID NO: 161341 - protein, 244 aa, Heterodera glycines
  unsure (1)..(244): unsure at all Xaa locations
MTRSLGENARMELAQKIEGQLTGRIAGIHLLEREDGLLVVNEDRTLRVLLRRESGMFWPSIIHDLPHIPTKLSCSEQKNTIFVGFANGQIHEYSIENDFNSISFKRQWNSHTNSISGLGFSERLEQMVSCSKDKTVVWHCTSTTRKIASYCTGSPCTTLQFDGDASFVFVGDYSGNISVLRLVVGTQQQPQLISKLSAHTGAITDLCWDLSHQLLFSASTDSLVIVWDXXRQRXHCYELNVTMP

SEQ ID NO: 161342 - protein, 169 aa, Heterodera glycines
PSLFVRFISFPSIILILFPFKILILSLPSLTRLSSLTLTLSPLFFSTKNIIIALFLQNFTSSITISSKMSSFPFFWNGTKFGPFRPNPSPSLSLIHPFPFVYHWSVVCFCSVIVCQLSLLPPSVALFHKSLLFSPFLFLMLPIKFSLRYDNIILLYICVSFLLFGSNSS

SEQ ID NO: 161343 - protein, 216 aa, Heterodera glycines
MDLFNGAKKDDSVTLEDAIPHLKEIFHEPKLHFCTGLKRWVSGPVVLPCSEKAFKNIGHSLFQGESISHSNEHWTAQHMHRALAICISRPPRDEGAVDGYATFQDTSRANEYIFVPSVKIRRRARYGKFAVQGELFYRVLDSQCGLSLLDIHFSKFSRHFPRLILSHLGCPIFGDWIYEQRLLNVDGHPICAEPDVWRAEAKKFEPSAFLNKIGIG

SEQ ID NO: 161344 - protein, 212 aa, Heterodera glycines
PWEDACDECQLIIKRVVNVATDPEKVAELKILLSALCQETSYVEECRLFVSKLDLFLGRLLPFLRDAHHVCKELRICNNGRLQQFHVLGLHFARVNASFQRKDLICEECQLAARELAREVSEPKFQQYVEEWLQGNVCVHLGTLKSSCEQMLDEFLPEMWRELEDILSDQKKFCQDLELCPAGISSPSSARRPTAQSKARKVSRHLLAPRRE

SEQ ID NO: 161345 - protein, 201 aa, Heterodera glycines
MDLLTALADKMKNEEQDEVGEEEEEDEFPHIANGTAAHLPAIIEDEAEDELNAMLAKARRLKQTETDKMHFVKSEQYNNDGTSSDDEETTPATLAGGHSTSVVFDSTSEKYKSIGGSFGLFTTSKHQVKMETGIGFDESEAVPKRSGTEQRKKAKEILRTATISSVGGSDNEMDIGTDFDGFGPIATGNGKSTVSESDEEE

SEQ ID NO: 161346 - protein, 168 aa, Heterodera glycines
MAPKFLPPELLFEIVAFMPARGAVPNALTSCWLLHSLLLQRVTKWKQQMAEDRQIKLLMEKMDEKFAEMKAELKAEISGKFAEIDGKFAEIQDQIQDLKAEINQKAAKISIEVPAQGLTIQQATKAGLLDLESGQLTIMCDTATNLSLAKAIEIGMLDPHSMTACDSS

SEQ ID NO: 161347 - protein, 166 aa, Heterodera glycines
WQTENSELFNYQKQILDKGVPELFSAVINDKNVGKAGAYKEKHNESSDIFSKVYEIADQKFKDLFKNNAFPTLEKLFGDAKALFVNTTPLLDYDIGSLPKRVKFIGGIDLMQPDHKDALPQVFGQPKPVIVFSMSSLLEPSKMPLDKFKTVIQGLGMCEKEVIWKY

SEQ ID NO: 161348 - protein, 185 aa, Heterodera glycines
QLMEHDLEGAPYGYTPFCDSRKSMDGFRFWRSGYWAQHLAGRKYHISALYVVDLVKFRQIAAGDRLRGQYQGLSSDPNSLSNLDQDLPNNMIHQVRIHSLPQEWLWCETWCDGVSKDSAKTIDLCNNPLTKEPKLDSAVRIVSEWTELDNEIKRLLTSSSNNRSAVGKPQDDETAFDDDEKHEEL

SEQ ID NO: 161349 - protein, 222 aa, Heterodera glycines
  unsure (1)..(222): unsure at all Xaa locations
KEDDKEKEEKAEEEKEDEKEEEEKEEEKEEEEKEEEKEEEEKEDEEEKDDEEXRRKEKRNXEEDKKESEEDKEHEEEAATRAPSAKKEKSVSESVEESDGDPVEQEPEEEEEEEEEEEEPYHPLKSDEIIGGCEDSTDDCAAKKMRLYCSDEDYEEDMHIRCPLTCRFCKRGEPWHYNYEATYEKLGCKDTHPSDCRREKEWCRRGTYKSFMAEKCALSCRR

SEQ ID NO: 161350 - protein, 180 aa, Heterodera glycines
MSSDESTTSSASAVSVQLREVPIKDFNDVLPVLQKTLNQLEHPFIKKAEEISGMEREKLFYITSSLVLLVLMYCPGNLFLSTLITVAYPMYASLLTLNTQNTSEYTQWLVYWCVFAEFCQLDLLFGSINGCLLLLYVPLKTVFLLYLALPQTYGAHNMYVKHIRKWIAMTNVLDKMKKML

SEQ ID NO: 161351 - protein, 53 aa, Heterodera glycines
MNELTHINCVALTARFSLGKPVVPTALFNLPTRRETRVAYWALFRFLPHSTHA

SEQ ID NO: 161352 - protein, 131 aa, Heterodera glycines
  unsure (1)..(131): unsure at all Xaa locations
LWPPFCWPKRLCGSFPPFPPAPLARPLCPLSDANSKNSPXWFVYMHSLALSLAFSVQMYTKSLSDSMGYSAERNTPNSPKNIGTTATERRHGHWKSIVPMPSSPLPRPFAVVSPSDSRPLSFSFGFAPLVK

SEQ ID NO: 161353 - protein, 62 aa, Heterodera glycines
  unsure (1)..(62): unsure at all Xaa locations
MGSKDMACLGFSADLVMHRSAHXAAYPKPVDVKMHRELPAFISNRGGVALRPGDGVIHSWLN

SEQ ID NO: 161354 - protein, 225 aa, Heterodera glycines
  unsure (1)..(225): unsure at all Xaa locations
QMFVVEHAHGDQITFGELXISGSTYEPTGQIMYNGVQINCATDQHKALTELATICSLFIDSSVDYNEMKHAYEKVGEATETALVVLAEKMNVYDTPKHNGLSPRELGSVCNRVIQLKWKKEFTLEFSRDRKAMSVYCKPPADRTGAGAKMFVKGAPEGVLSRCTHVRIGDQKVPLTQAMTQRIVQQCVKYGTGRDTLRCLPLGTIDEPPSPENMNLEDSTKFGEY

SEQ ID NO: 161355 - protein, 74 aa, Heterodera glycines
SINAFRINPSAAFGQRFALSAMLSHLLLIIMLSIGAFRVLPIVRRRSSNNGHHLGMSGQFQYILRSNAVACPVG

SEQ ID NO: 161356 - protein, 196 aa, Heterodera glycines
  unsure (1)..(196): unsure at all Xaa locations
XRWKSQRRRWGSDCTDEEDDDQLDTGFGFLNNITLSEIKQIHYQTNLNVAKVKKAMLRVISSHKKCAPPAVDFVMGLDDEADAEDHLSSCPSQDNDSEQIESDVESMAAISDDGTPTAEGVQNTAAKARGINSRELFANVPRFLNGMTKRNLTVTNSFAVLLHLCNDKQFTLAQMEGENKLVEGHSMAEFFVKFPN

SEQ ID NO: 161357 - protein, 196 aa, Heterodera glycines
  unsure (1)..(196): unsure at all Xaa locations
FYGAGCLITEGCRGEGGFLIITTGXRFMERYAPVAKDLASRDVVSRSMTIEIMEGRGVGPLKDHIFLQLHHLPPEQLXQRLPGISETAKIFSGVDVTKEPIPVLPTVHYNMGGTPTNYKGQVIRFSNEKGDQVVPGLWAAGECAAHSVHGANRLGANSLLDLVIFGRACAINILSANKPGDSLPPLETDAGESSIA

SEQ ID NO: 161358 - protein, 232 aa, Heterodera glycines
  unsure (1)..(232): unsure at all Xaa locations
IAPPFRARDEAELLLLPFFXCFGFTQLNMALLNGSTGVVLSKFEQNSFCRVVEQYRIRLLLLVPPILVFLAKSPLVANFDMSHVRAILSGAAPAGADLCEELKQRFPNLQHICQGYGMTEMCVAIALPILDKERHESSGKLLANLEMKVVDLLTRKEVELGMPGELFVRGPTRMVGYLGRPSETAKVIDGEGWLRTGDIVLVDKYGFITVVDRLXELIKVNGLQXAPSELED

SEQ ID NO: 161359 - protein, 100 aa, Heterodera glycines
  unsure (1)..(100): unsure at all Xaa locations
STDPATSFLTAAIILCILRAGITAAAGTRLALSXYSLKGLNCTHSDDRPHKRSXLVISRHYLLALRVDVVAISQAPSPESNPYPPLPVITMVVRYTTIES

SEQ ID NO: 161360 - protein, 170 aa, Heterodera glycines
  unsure (1)..(170): unsure at all Xaa locations
MPGCNNGVTTAQQNTKRSPIVPLPDNFCTFGLDGVSKKVIERLREMNLLQPKALQLNDDEFASAEVILSQADFAINECQIVALEKGILWSPETIVPALDLFRIALLHPKLNEIFCSLESVLGNPPKGVPTVRRLVEXAHLAHGSEPVRILACRSLANASAHDFGRSMLMA

SEQ ID NO: 161361 - protein, 248 aa, Heterodera glycines
KAKPGSPKSPSKAKPGSPKSPSKAKPGSPKSPYKAKPGSPKSPSKAKPGSPKSSPSKKGNVSPNVSPSKGKSPQKLLSPKAMLQTHKSAPPALAHILAHHSPHLPVGSELSPAKSLDSHHQRQMPLFAEKKYGQNHQSPYMSPTKLSNGNVSPPQSPSHRLQQIIKRHSQTKDLSREKVQRQQQSPLLQHPSIRALIGLPNSPADDQNPPPPFTPEQHALLMDTVLRPPSGLPFESPRSAPSPLELSE

SEQ ID NO: 161362 - protein, 147 aa, Heterodera glycines
  unsure (1)..(147): unsure at all Xaa locations
IPFPFLYSLINAPNGLTILLLISVVIGHSLANLGPTIKHNPHFKAVQTAHHLHDAIAKKHEAEVTQIICSISNEQRQALALEFKKQFGTDLIAMLKKEFKSDFEELMXIIKCKNSHLNLNLQSISLMQTPAVYDANQMRAALSGSNE

SEQ ID NO: 161363 - protein, 77 aa, Heterodera glycines
  unsure (1)..(77): unsure at all Xaa locations
LYLSALCPLDSKIELXIFVAFHLPISHNFQLHVVAKSAMLHFVCVEQLAKSCAVFGMQFVTSSSLGAETFSTSIGAT

SEQ ID NO: 161364 - protein, 198 aa, Heterodera glycines
TTTEGQLAKGTTPPIPQTSQQQQIQQPMTISKPNQHHNANTGGHRANASLSPALGSSGFGSSASSNASAQVERDLIDLFDEQCSIGPPLKWTPSPPPLQQHQFSGVMYPHTGVIASMDLKSRGYYVYSNEFDNELYLLTEELLEKGSWIKFNILDDYYRLTIGQYALLKKSPFDVRVERNTIYVGFFTGSWVKFVYIY

SEQ ID NO: 161365 - protein, 100 aa, Heterodera glycines
ESTHCLCKMRKDGRRRNFLFSSIKWHNLFTKEKVIIIRKFPIGTDNRHFLTFLILHFDSHCAELMKRESNCFLQKKNPPHFPVPPLTPPTLPLHFPCPLG

SEQ ID NO: 161366 - protein, 123 aa, Heterodera glycines
  unsure (1)..(123): unsure at all Xaa locations
RTFSIKLWNTFTDCCNCLPIAALIHXKIFCCRGGLSPDLQNMEQXILRIMRPTDVPDTRLLCDLLWPDPDKYGHGWRENDRGWSFTFCPHMVPNFLNRHYLDSICHAHHAVEDCYELFSKRQS

SEQ ID NO: 161367 - protein, 46 aa, Heterodera glycines
FFFFFFFFWRKRGFMCNNNSENEANTEHREKTTTRVDFVSFHRQFY

SEQ ID NO: 161368 - protein, 190 aa, Heterodera glycines
MDKLVLKIRELLDENEVNFGEVQRILEEYKSEPKDWRQFTHFDEHKYTRNLVDAGNGKYNLMILCWGPGMGSSIHDHSAAQCFVKVLDGQLLETRFAWPKKEKEEKEEEKEEEKEEEEEEEKEEEEGPMRATGTELFKTNGVSYISDKIGIHRMENPSHVDPTVTLHLYIPPYSQCYSFDQVMVPIIFSI

SEQ ID NO: 161369 - protein, 243 aa, Heterodera glycines
IFRLKKLEGEATANNRKAKLIFFFEWSIDVNFIATVSGSETEYKGSVEILNLSDENEAHEIEISVHIETAGPHENEIRHILSTDGLSFVRSKVGTYVRELKEEFSKGIILPVDSKGAIRPQAVATQGKTVVDKRRFQNDIIQKTEEKVTTAETQNALKTGGFELTETFKVPPERLFEILTASELVSVWSPNSSIDAREGGQFSLLGGVMSGHFTKLANAALISMAWRLKSYPSGHFADVTFTL

SEQ ID NO: 161370 - protein, 226 aa, Heterodera glycines
RNNRAFDMEKFDIIQRTMRMYFESEDSSDVFEGFLNVVKYVKSLTTEQLDISLVKLALLAFYEFQKLGIAQGQQIPFDLHIDKTLLLDALVPCFRLKTKYIEAISSVFHLKDREMVEVAIAQIKTLLENEVPKAVFWMDHLNLRDHFPFNTIVCKLILENQTALIYPFVGESQFRRNKLIHYLDNLLGLVLRNRRAGDEYEREIMKNQKQLEKLTRKFVKNFELTE

SEQ ID NO: 161371 - protein, 71 aa, Heterodera glycines
  unsure (1)..(71): unsure at all Xaa locations
KIVRGFYGWLLRSLDWINRQILHRLSLSAHNREDMIIKSFRRSYPGLLQRLNELKRSGXPVLQRRSVHLVT

SEQ ID NO: 161372 - protein, 83 aa, Heterodera glycines
MKPSFNFKLFASVFLVLCVASLVLCQHKPAAACKPPKNVGRGNLALTRWWWDGRSCKQFIYKGQGGNTNNFPSNKLCDQVCKP

SEQ ID NO: 161373 - protein, 164 aa, Heterodera glycines
KESRALSDRIVRIISSLAQAVPSDFHEKLSDESKLWLGMRLKSFTNALMSSCAGEALRDGRSMLAEMFRAIPTESSAILRAIYESVTNHGNQLNAQLVLIRLAAESGDGQQSLLHVLKEVSGRESVPGKFLKSLETFQYLCNQLKKVEEQRKTAQLTQQNDDTC

SEQ ID NO: 161374 - protein, 50 aa, Heterodera glycines
PNCLPRGETFYWLRAVGSSLCIKIFASGNHGSVLCQSNFLSCATTRLEVL

SEQ ID NO: 161375 - protein, 65 aa, Heterodera glycines
  unsure (1)..(65): unsure at all Xaa locations
MTRDELKDLACLGFSADLVMQSFCXTAAYPKPVDVKMHRELPAFISNRGGVALRPGDGVIHSWLN

SEQ ID NO: 161376 - protein, 80 aa, Heterodera glycines
PRRGMDNPNQANHRSQVISSRPVIPVLLWALLRWRQVRLRLFPSSPRSAVLRWALIRWRQVSLRMFPSSPRSAAPLSQLA

SEQ ID NO: 161377 - protein, 54 aa, Heterodera glycines
FFFFFFFFFFSTSINQLAKRSASSKNNNYPIRSNPHNISTMRKQHKCKKQLSSP

SEQ ID NO: 161378 - protein, 261 aa, Heterodera glycines
KGADPNEPVVGRENDINTNLTPLFVAALHAHFPLCRVLVDRGANVDLGSDCPTPLMMACKRSQMEIVAFLIENGADINLQNGDGETALMIACSRANVDIVRLLLSHGANVEQTDYEGFRFALKNAANEGHLEVCRLLVEEWAADVNQQTIQDRTTALICAASRGDLAIVNFLIEHGADLQHVDVVGNNALMWAVISRKTEMARHLVAIGADINQRDTAGNRAQDIAVLTGHAEMMAIFRTTATDNGHAEGTDGQQNDQQQM

SEQ ID NO: 161379 - protein, 105 aa, Heterodera glycines
MSDQPHNYSYSSPKPPITRLMVASGVTVDREGWYSLMFSIIATAACADVRHIVSDRFVDRAFLAHLRRQGQMTVTAPGLFVLRHNRSHYHFLSVCCPPPQRPSPP

SEQ ID NO: 161380 - protein, 46 aa, Heterodera glycines
TGGTNQRTFFFFFFFFLVFFFFFFFFFFFFFFFFFFLYGESFLILS

SEQ ID NO: 161381 - protein, 184 aa, Heterodera glycines
  unsure (1)..(184): unsure at all Xaa locations
MDTLFKCCKTNSALVILDRSDDPVLPXLLNQWTYDAMVHELIGLNNHRVTLKNTGNDGLKNIVLNAQYDEFYSKNMYLNFGDIGQNIKGLMNEYERKAKTHQQLESIADMKKVVEQYPQFKKISGTVAKHVQLVGELSRMVTDGNLLEISELEQNIAVANGDYSACLDSLRRLMQRPKTTDLNA

SEQ ID NO: 161382 - protein, 152 aa, Heterodera glycines
  unsure (1)..(152): unsure at all Xaa locations
FNNXRNQHQSAEEQKANEGCDPGEKERMERESLIEEAYALSQEANISLEQIIKRYTKCRNQFLERVTDQISDQLQQDHSDSTDDISTNKHERKKRPIVFISPQLRKRVKIQQQLAEADSANDGDDDSEQKQQKEKSPFTIPGGAEDDEMTDV

SEQ ID NO: 161383 - protein, 53 aa, Heterodera glycines
NTGLSLEDQSANVGPSLFGPASSHNSGLIRPALEELSFMLSYVIQNPNSLPQH

SEQ ID NO: 161384 - protein, 51 aa, Heterodera glycines
YALNDPNRLLAVVPFLVRTYFNGARVVQRALISLVQCCIVRQVDSQPSMVT

SEQ ID NO: 161385 - protein, 38 aa, Heterodera glycines
FFFFFFFFFPFFFFFFFFFFFFFFFFFNKTNQDFNVKN

SEQ ID NO: 161386 - protein, 223 aa, Heterodera glycines
HLPDGEIQPSQNLNIKIEPSLIAVGAKHIAIVLNSKAWFYEIKRNGTSFMYEHDYMTTIVKMKLNRDFVMAQLDNRVHLHKIIRSQSDHSDPSDNYMTNDVLFPNSNETNPRDVILDADLSEKFFIYSTRSRFLNYYSLAHGRFVSDFKHSSEIRKLFSEPDGIRTIFYDDAHDLHIYSPADDQLSKIPREGSSMSNQKYDGCLWEAFTVDKDTFLVHDQHTI

SEQ ID NO: 161387 - protein, 89 aa, Heterodera glycines
MIEFYKWSANYIHSFGAFQLCPPPPPKLIGDLIFSDWSDLIWLRQGVKKSIVRINFIINEILILIYCTKRKTIFSPNNKIFKAFLSLQK

SEQ ID NO: 161388 - protein, 96 aa, Heterodera glycines
KMVFWKDNNVWYATTPEGVRRWSISTSTRGLRKSNVAQRHSIFFGRHSLPQDTLPIFLQTLPLIAPWKGFTALIEADKMVNFGCQSHRWLAHSMAI

SEQ ID NO: 161389 - protein, 57 aa, Heterodera glycines
VLCQYLCPPFSCHPVSNSPMAEPLHPVIHFSCPHKLLLAALISAIYHACYFLDWSMP

SEQ ID NO: 161390 - protein, 71 aa, Heterodera glycines
LIFLLLWARTTAEKNTRRNNGGREKGKVGSNRPNERRITSYDGLEDYKRRNRENPFESQLKFFAAHASCCK

SEQ ID NO: 161391 - protein, 138 aa, Heterodera glycines
SGGEVNGVIRTEGEQWKQLRKFTLKALRDYGLEKGATEAMVLEAIFTLIDEVEGEVNSGNSELSFYRKVDLMTGSVINRMLFGFSFYGDRYKTFTFLKDALDVEQEYFISLISQMIEARPWLRHLPYFSKKKKKKKKK

SEQ ID NO: 161392 - protein, 108 aa, Heterodera glycines
THPCKLEVAMATPAELDLMPVILEINKDTFSVGVTPTTLTSVGKGPCFSCQQSEEVNRQSMAAASEGPCNFACQFPRQVAAAVELMGPIEGRLSDDAKDGPTKDPFST

SEQ ID NO: 161393 - protein, 231 aa, Heterodera glycines
MRRFGKTYLCSYSRLCIDAKLRCNGEDNCGENDDSDEAHCSRIEALASPTTIVVAYIVSGIIFFFILSLFCFLFKSKLEKKNNAKGEEKRSRREREKRKRAQRKRREGRKSGRKAEGEAQRQTARQPSRQPRPRRTVADGHKLSGIYGGVGGTQSVFGRRGTMRRMAEEESEEEGATATAGHQEDAQHHHHKQHHHDYSQQFSQHGQTDQFELESQKRPKANENNVRIFYG

SEQ ID NO: 161394 - protein, 71 aa, Heterodera glycines
TSFSSGYLCTGRSSYSKFRYGCTIVGEVYAQLSIGRCSKCSVGSRLAAHCFTVCVGSPKCVQPCPMGSRLC

SEQ ID NO: 161395 - protein, 54 aa, Heterodera glycines
NVVGNMARSILMEIVKGGIGPDSHMFPPDIEAVGENHKGLFQRRVYKKRKKKKK

SEQ ID NO: 161396 - protein, 86 aa, Heterodera glycines
  unsure (1)..(86): unsure at all Xaa locations
FFFFFFFXXTSPAPLLRHRRPTDGAPFGWMSADDMLSMPVPESCPPPAPPLSASSASFSTSSTSISTSSKSSSSSASLPPCQCLRC

SEQ ID NO: 161397 - protein, 59 aa, Heterodera glycines
DATATKTDGSRAAANATGTATAQEGYRGRTTVTGHSVAAAASEVQVRATVDEKISERFV

SEQ ID NO: 161398 - protein, 61 aa, Heterodera glycines
MRLISVTILALCMALFTIHYDCPSHMVSHLIKHMLNHTTKKMDELHMEELAIITSPPNILQ

SEQ ID NO: 161399 - protein, 94 aa, Heterodera glycines
GVPEWLLHEAENTNACGTFALFHALTNNTDRIDIGNGVFYDWFKAAKQLNVEQRSDLLANDSELAHLHEHCALRESETDVPRNVAHHFISYFTH

SEQ ID NO: 161400 - protein, 57 aa, Heterodera glycines
TVHQLKLSHVAMRWRRCAMSVAVPKDGLLRRDSQLVPVPSMVKGEGIGTGKSWRASL

SEQ ID NO: 161401 - protein, 127 aa, Heterodera glycines
MPNIFKILLIVLLAVVSFRLSASTGDKKTANDGSGNNSSAGIGTKIKRIVTVVLLFTSLATGGAEAIGRSNAQGGNAAGLAPSHVTNRSMAPPPPPVQCEMGANRLEKMRAHLRELAEKMPVNESNR

SEQ ID NO: 161402 - protein, 98 aa, Heterodera glycines
LTLVGQFESASAISLYPAVFVSSIRFQCVYISLLFFSHMYCCCIINHLRYICNETVLINLNTLSVGRSHGLSFECPFSVLHFHPTHFRPNLTWLAHCP

SEQ ID NO: 161403 - protein, 215 aa, Heterodera glycines
  unsure (1)..(215): unsure at all Xaa locations
LAGAKIIEVGDTPKERALFNGAQKLFGMVITIGQAIVYVASGMYGNPHEIGAFICLLIVIQLVVAGLIVLLLDELLQKGYGLGSGISLFIATNICETIVWKAFSPATMNTGRGTEFEGAIIALFHLLATRNDKVRALREAFYRQNVPNLMNLLATVLVFAADIYFQGYSCRLXPIKSARYRGQHRSYPIKLFYTSNMPIILQSALVSNLYVISQM

SEQ ID NO: 161404 - protein, 28 aa, Heterodera glycines
LIFFFFFFFFFFFFFFFFFFFFFFFLIN

SEQ ID NO: 161405 - protein, 62 aa, Heterodera glycines
FFFFFFFLHRSFYWINKPNKTNGTVINNNHYCMGSLGCWCALLYSLNRSVCHSEKRVANFSL

SEQ ID NO: 161406 - protein, 80 aa, Heterodera glycines
THEKNSICNACLVLLTNIISLTKTFSQTKHSVLSANHPLEPASFGTAFPLLWSPGDGDNGPRHSMPRITKRPIEFPRASW

SEQ ID NO: 161407 - protein, 65 aa, Heterodera glycines
SGVDFASLSCLSTITQSTSDELGKKSKGSPTIELLRAESDCLPPEWLLPNSSTYFEAADSMAEHS

SEQ ID NO: 161408 - protein, 150 aa, Heterodera glycines
NLCRKNNHNIINSSNNMLLVEVVVVVSSHNNNLQRRKRRSNRLAVMSNHNRNNTFRPTWLTVVVVEQHNSIRWMPKKNIWRRSRTNWATSLALARALFQLHSIQHLLQLLPMFVVQSSSNNIHGLRQQQSQDITAAQPEHHYHSIPIGHR

SEQ ID NO: 161409 - protein, 108 aa, Heterodera glycines
YRITLRCNGQSKGTLCTNPRHSEIFAENSVSIDGMRGLNDPYDGKQFATFIGLTQIWENFLNLCSNAGGELTWNDQLISRLEAEHCDVGMCELYDICRFAMFHRIAAN

SEQ ID NO: 161410 - protein, 187 aa, Heterodera glycines
  unsure (1)..(187): unsure at all Xaa locations
WTVYWRPLLXAMARLSCDCRRLIRAQSLDALGNSFRVPALSELMQPADWEDCFAELLFPLLTKLLAISPPISPMDPIGMEEAQILSIQFICKILLGNLTQISRLDSFADLLSHLFELMDQFLEGSSCIDLLAEVIQESLKNCALVCENFGVFRDNLAELHGQLQERLNALAKKHEIASSVGTIKLST

SEQ ID NO: 161411 - protein, 216 aa, Heterodera glycines
RTKMEIQPQPFVDEAANVQNIVNAIGKCPLAIAVPQEGSETVPISPSFTGNINMFSSIPISQELPFTSPANELGVSAPLSRLRSVTDFDDQNQAESPRASNSFPQNLASHNKNRMRNNSFPFASLLLESQSSSSQTLPGVPENDTVSGKTGESDNLSKRGANFLHTKVHSAQELTMRRNSSLSMDTFGDLSTKIASTQSAEKVHFACGEQDQRLEN

SEQ ID NO: 161412 - protein, 214 aa, Heterodera glycines
RKGRVCRRRALPFSAHCGPSAFFTPGELREQLSQLVQRFPHNIPILQAPLRVGSDFHRRRFLAQHPGTDDRSRLIRTCGRIFAAHHHYLAEHKRYYEQKFDNQAFRTLLYQYVHLLRKAAEENCGSALPDDYIWVFLMQHITSERTMLPRRVIDEVFTIGQGRCPWSKQFLMESLRGCCDRTDPSVAMVNATMKTHGISVYCTDPEVQLLLENV

SEQ ID NO: 161413 - protein, 57 aa, Heterodera glycines
NHPPPGRHQIINTQRETDSAAVKGTYTHHQLSLIGSPLSPPPLTPTANPTPSPSGPS

SEQ ID NO: 161414 - protein, 215 aa, Heterodera glycines
MSDHPNVALADLSRVANDVWLDTLFWIDRAEVGMKFALIDARFGRLVATHFNLRKWWLGELGVHRAPRRWQCGGTAAVSAMDDYAMSNRLPLATCPAPNGVIGFRAIYIWYVDLEVIAFLQCLQRVINRGIAVQFTIHSTDVRCWALMAQRIWPLIAHGIIALNDMKAINLALLCRHVSPNVLFDCANLRAITNTHMFPIRPPHSAVHINELLQP

SEQ ID NO: 161415 - protein, 30 aa, Heterodera glycines
  unsure (1)..(30): unsure at all Xaa locations
TLSMVIYHSAVFARDSANSTAQMVAYEPFX

SEQ ID NO: 161416 - protein, 47 aa, Heterodera glycines
SKKVVQSEANTKYKLVRVKSQDMGCIMEGVNKQSVRCSHWLVWRGVN

SEQ ID NO: 161417 - protein, 195 aa, Heterodera glycines
  unsure (1)..(195): unsure at all Xaa locations
MAVVDYSSNFWGDKHIGYSVLYENMKKGEESVHELLTFLKERVNMEDDLFKSLGKSLHRVNGYISNKSGFVDAWKLAKETLELWTEIQSSTLRNLNDLLKEVARYQEELARMRKRAKDADTLETINLMQTTTTCLQKARDTFNQRSTDVVSLKQSNKEWTAAITXEYLRARNILNNAHDEYKPYMDKYSQIRDTF

SEQ ID NO: 161418 - protein, 212 aa, Heterodera glycines
QQTVGLAAQKVVVMKISSEPIPTSADGVKRRHQKRKGGRASEERTDATLVKQMKGTNTVVMGTMKEEREEQLYQREGKPEAKEEDKLKTAPAEAEKKTEKTGKDGKRGRKKKRDKQQREEGGGTKFNWFAEFPFDTAATSISEEQSAPAATDGGIPAKVFASPTRSFVLPAHERHLLLLPYMDIGLPDWRVHDFPQPDRFLFPEPSEWHKKP

SEQ ID NO: 161419 - protein, 33 aa, Heterodera glycines
RTTMHFLGLAPPRGLATLCMHHCMTCEALPIRA

SEQ ID NO: 161420 - protein, 230 aa, Heterodera glycines
HFVKIANEYATRDVVIQYWCLLKALEDGVKLSGNEPNTKKFLLDLMTVLENMKQSHKENDAVMQEIVGQSHIEDQAQRLFQFAYGLDQHSQFGQKLIKAFYTAGYLFDVLTCFGQLDDNIQSARKYAKWRAIDVHNCLKNGEQPKPATNPTAQQQKELSDQDDIAAQINDKLSAELNDLNASLAKSPQSPAVPQQQFFNPMLTHPSQQRQIPSNYGQSDAINGGHSTGHF

SEQ ID NO: 161421 - protein, 40 aa, Heterodera glycines
  unsure (1)..(40): unsure at all Xaa locations
EARXYLQLKEGESDRKRRNLLITPLNWQMPSLRFPPPPLS

SEQ ID NO: 161422 - protein, 106 aa, Heterodera glycines
DKSVLKRVDVKQLQLFLQGAVMPTVNAGLLAYAETFTAPAQQKRYGNKGLLRLWNALKTLLDELDEAMRVNEATMGNERREYQQMLRNAYENTVEKLNRAFARGRE

SEQ ID NO: 161423 - protein, 145 aa, Heterodera glycines
IILFHSILLFLQNVTFFSPFLFFIFTFVILLLICAFLPQISEVENEIAEFIHRNPLAIDHRIALVQLIFEHQTELILANEQISFPKNISLDDLAFPYEMLVSKITSENFEELAQNLRKNALKLAKESTGKFHFLTENHFYGQFIN

SEQ ID NO: 161424 - protein, 68 aa, Heterodera glycines
KIGNILPKNKIFNKYCLALLSLIHAAFSTSFLPSFSMKNSMENVFGSRFCAFRQSVHIFHDLFKFSAE

SEQ ID NO: 161425 - protein, 117 aa, Heterodera glycines
HPNVDTFAFMGNPQKDYLIALVVPNRKNLQALAEKNAVNESSWEAICANKEMAKLLEKELQNFVFWKLRREEIPRKVIICAEPWTADSGMLTEALKLKRKNIERKFAEEIRQLYEGK

SEQ ID NO: 161426 - protein, 63 aa, Heterodera glycines
  unsure (1)..(63): unsure at all Xaa locations
LLEKELQNFVSWKLRRDEIPRKVIICAEPWTADSGMLTEALXLNRKNIERKFAEEIRQLYEGK

SEQ ID NO: 161427 - protein, 53 aa, Heterodera glycines
DGNGTHAQPRESKCSPSWTALTLPNSLRIGNQSGCSQNRCPPLIAGHILTTAI

SEQ ID NO: 161428 - protein, 61 aa, Heterodera glycines
NNRKETFGLIEYPSMAALTKYRILCANIGNYSFPTEICASAFVVHELLCMRMNRAPRARYD

SEQ ID NO: 161429 - protein, 150 aa, Heterodera glycines
  unsure (1)..(150): unsure at all Xaa locations
MSSSSSAAPSDPQQKSIYEFSAKDIDGNETSFGKYRGKVLLVXNVASNCGFTDSNYSQLKQLLDKYKSKGLEIAAFPCNQFNNQESGCAIDIKDFVTKKYNFEPDLYDKIDVNGPNEHPIYAYLKSVQGGILGFDAIKWNFTXKFLIDKN

SEQ ID NO: 161430 - protein, 52 aa, Heterodera glycines
NGHCYASEAWGDIPYGSLEGACTFISGSAVVTTHTTSFRCSSVTRMPSQVHA

SEQ ID NO: 161431 - protein, 121 aa, Heterodera glycines
LCIINTAIKYEIHPISSISMPSSSVRPRRSVQCLCVSMAYLLSGIVDEDLSFVFDDDALGGCMSDLRLSGILVLVEEDDDFHKGSLDINPLGFDEYPPPFDFSVSLSDEEGPSVAERRTYR

SEQ ID NO: 161432 - protein, 76 aa, Heterodera glycines
SGLLILIYSHLESASSSSSTVPYVCTYFSIYLCRTSILAPTQYRLTFYFTLIWTVMKYKNKSHFHPQKVPICTITA

SEQ ID NO: 161433 - protein, 106 aa, Heterodera glycines
  unsure (1)..(106): unsure at all Xaa locations
RIEFGILLATPNALFSITTSMPNSIKELFSARNNEIINSANDGSDLFGHFTASATKQLRYLETTELRLELVKIQPELSHSFIESLIQLLPDPECLVNVQIVHQNXM

SEQ ID NO: 161434 - protein, 228 aa, Heterodera glycines
QPCPKDLSGDSRSGAYLFLPDGPAKPLSADGNSFLVVSGPVRQYVHVKGPVEVGIRHQIALDVHAGHLAILNNVNLATDTRANIELAMRLRVPFMRQDNFFTDLNGFQMIRRRRQPQLPLQAHFYPMPGAAFVEDADIRLSLMGRQALGVANLEKGEMQVMLDRRLVQDDDRGLGQGVEDNLLTESRLHLLLEHFDRFCYTPASSSADGTIALHSLAVHHSSLRLHYP

SEQ ID NO: 161435 - protein, 140 aa, Heterodera glycines
  unsure (1)..(140): unsure at all Xaa locations
KILLIVLLAVISFRLSASTGDKKXTANDGSGNNSSAGIGTKIKRIVPAGLLFTSLSTGGAEAIGRSNAHGGNAAGLVPSHVTNRSMAPPPPPVQFEMGANRLEKMRAHLHELAEKMPVNESKRLSPSGPDPHHHYGHGWI

SEQ ID NO: 161436 - protein, 143 aa, Heterodera glycines
  unsure (1)..(143): unsure at all Xaa locations
KDPKKCQHFQILLIVLLAVVSFRLSASTGDKKXTANDGSGNNSSAGIGTKIKRIVTAGLLFTSLATGGAEAIGRSNAQGGNAAGLVPSHVTNRSMAPPPPPVQFEMGANRLEKMRAHLRELAEKMPVNESKRLSPSGPDPHHH

SEQ ID NO: 161437 - protein, 148 aa, Heterodera glycines
ASKVISRPICPFNILQNSRSFLIFFAALTRRWWRKRPKGFVVATQTNADIIKVVPTRMFSVAAQIKNAGIVQIVRLFVLPLNHLPNLASLHHPIGILFAHCHRFIASVVDQFKWNNCFVDEQIKLNSVADRRKSMARRNASFKVLTQS

SEQ ID NO: 161438 - protein, 64 aa, Heterodera glycines
  unsure (1)..(64): unsure at all Xaa locations
IKIIENTGLLFTTLATAGAEAIGRSNAQGRNAARLGPSYVTIXSMAPPPPTVQFAMWAKRVKKM

SEQ ID NO: 161439 - protein, 149 aa, Heterodera glycines
  unsure (1)..(149): unsure at all Xaa locations
QKLAIAKTAAQVKEIKSPAKPMVLKAVPPHQMHLMNEKVXTAVSPPAHARSLATVPYSTPMAADRNSLPSYTSDGTNLDMAHENDDYQNYYYGTEDSSREFDASAEEEDELYEEGDGAMSWQTDDYGIGIGQEYGHQSVEVPPKSVMLD

SEQ ID NO: 161440 - protein, 231 aa, Heterodera glycines
  unsure (1)..(231): unsure at all Xaa locations
SGVATYAPLNPKANREKMTQIMFETXNTPAMYVAIQAVLSLYASGRTTGIVLDSGDGVTHTVPIYEGYALPHAILRLDLAGRDLTDYLMKILTERGYSFTTTAEREIVRDIKEKLCYVALDFEQEMATAASSSSLEKSYELPDGQVITVGNERFRCPEALFQPSFLGMESAGIHETSYNSIMKCDIDIRKDLYANTVLSGGSTMYPGIADRMQKEITALAPSTMKIKIIAP

SEQ ID NO: 161441 - protein, 160 aa, Heterodera glycines
MLLLRQLCLLLFAVFYLIDARTQSVAVKGRLLCGTAPARNVRVKLYDEDAGVDPDDQLDAGYSDPNGNFQLSGHTSELTNIDVVFKVYHDCDDGIKPGSRKLKFKIPNSYVTDSATPKKTFDIGVLNLETVFKDEERELIVTMKKKRRSHRYQDFLDILP

SEQ ID NO: 161442 - protein, 56 aa, Heterodera glycines
NSIPGCPLSSFIRAEMRTFRRQSVRIIISLKRHSAAISMFVVDEWCPYCASLQACV

SEQ ID NO: 161443 - protein, 56 aa, Heterodera glycines
VCPHFNSASSPAGFIANRCRWWYALRTESQSTAPIRRHYHTLSVAMSARIPRHPVG

SEQ ID NO: 161444 - protein, 111 aa, Heterodera glycines
MLNQPIGEVVATIDHPASAKCFYVRISIEQKVEQFIREDRPVRFVHNFRLEMFQIELDVQLVKWLIIAAAKRFASEAENLVQFVEVKPFQKARTKFGHSSNFFFEKHFRYL

SEQ ID NO: 161445 - protein, 105 aa, Heterodera glycines
  unsure (1)..(105): unsure at all Xaa locations
LTTYIHNWPVMPKAHDYIXEGNSTTDVLQENLGTLNSASYCQIVRSRLARIVHSDTIMLNSGQHXILIGDYYGSTNHNLYIINEPHHVLELTFVYLTLLQNSENE

SEQ ID NO: 161446 - protein, 125 aa, Heterodera glycines
  unsure (1)..(125): unsure at all Xaa locations
GVQTKGNPAQYVEYRDMRVTPTDDQQQMEAMIANRCKEAGPDDTYEHGPKGMXXELTPTDASCPRRHAHWSALSEQKCAFSKEIFIGGTDTHRLREKGMPAIGKSPTKNTPILLHDHNEFRNEGG

SEQ ID NO: 161447 - protein, 179 aa, Heterodera glycines
MSSDESTTSSASVVSVPLREVPIKDFKDVLPVLQKTLNELEHPFIKKAEEISGMEREKLFYITSSLVLLVLMLCPGNMLLSTLITVAYPMYASLLTLNTQNTSEYTQWLVYWCVFAEFCQFDYLFGSINGLLLLYVPLKTVFLLYLALPQTYGAHNLYVKHIRKVLAVTNVLDKMKKMF

SEQ ID NO: 161448 - protein, 138 aa, Heterodera glycines
  unsure (1)..(138): unsure at all Xaa locations
TPPAPHPQTTAPARTARRGTRRNAVGVHTGTARAPPPHRTGTGXHTXLPEEGPHIARETLAAYECKTMDPPEPPYTDEDTGPTEATGHPTTVTLWTIIAKERTETHMRGAGTAPGEAPPSYKARAARPSGHQPDSEEQ

SEQ ID NO: 161449 - protein, 257 aa, Heterodera glycines
  unsure (1)..(257): unsure at all Xaa locations
MLKGAIDRVLGMCVGYLDNGVAHRPLDVQRREHILHLATGLGQSGLRVIAMACGKDMNSLYYVGLVGIMDPPRPGCRQSIETVQNAGVSVKMVTGDALETAISIGTRLNIFNSGDNTLSGAQIDELTDMDLERLIRGVSIFYRSSPRHKLRIVKALQNIGEVVAMTGDGVNDAVALKKSDIGVAMGNGTDVSKEAADMVLINDDFSTIKAAIXXRGKGIYHNITNFVKFQLSTSVXAISLIAISTLFHFENPLNAMX

SEQ ID NO: 161450 - protein, 153 aa, Heterodera glycines
MDGTFSLGGILRQRECGGFFGIGGGREGNFQSLMLELLHTCGRKKAMLLKVRLPKLDISAINARGKMAELRGISIDLDISKGGWDMQWVDYEKVRPKQTVPEQPQDEDGTFGGRRTMETQTEPPEQKAAQRGEKAEEKPRGQWQEDNRPHAVI

SEQ ID NO: 161451 - protein, 153 aa, Heterodera glycines
TKIVRARRRPMAFSLAIPALPRRSFRPPFPFCYRQPNAWATRPGRGRMPRCSSRRLSLRVGFCRGECRFVPFCPQFPSSPCHPLLLPSLSTVRPPPPFVALSHFRWPPSKGRRLLRCNWPCIGRTFRKVVLSSSFTDKSSKVTSSWRRTESAP

SEQ ID NO: 161452 - protein, 142 aa, Heterodera glycines; identical to SEQ ID NO: 160068

SEQ ID NO: 161453 - protein, 201 aa, Heterodera glycines
QLLEECGGWTEPNRYKIYFSYRNIEHEHISHENVAELASGSTIGNYFGSIEDVENISATVVRPKFHTVQTQTEDTNNNEMLSNSSFCAEPGADNDMDGSKTEGMTAQELRMIDYERDIERLEIQCSKQHEQLIILSERAKHVELLEEQKVDLQTQTDILRRQNAQLIRDHEELKCLFGGGSISRNGLEELVRSAGQLREKT

SEQ ID NO: 161454 - protein, 60 aa, Heterodera glycines
CVWMMTQTVGQPTFDHDHDFTPPINHTTNFTLYSLFRLYIITGRQKKTIIHTNYKSKTKK

SEQ ID NO: 161455 - protein, 178 aa, Heterodera glycines
MEEEEEGQKSDDGKAEEGQQTKRQIGMDDDEVVAVLGHELGHWKLGHTMLLLTCTEVNLLLMLVIFSLFHQQESLFTAFGFPPAQQQPILIGLLIIGRFVMAPYTELLSVLMNVITRKCEFSADRFSAQLGHASQLCSGLKKMCKDNLSLPIDDVLYSWCNHSHPPIPERIEALKKYE

SEQ ID NO: 161456 - protein, 241 aa, Heterodera glycines
KKAENYLLKRKSAKSSSSKNRKRPKVTHSHKALVPQAKANGNSIDGTNTEKRGSACASSTAAAKNDGSIPMEDFVLPAQIKEIVPKTDAAEAPLLISEVDDGGTAIEEGPKNDGPSEGSGADETEEKRRSAPPQLTKECLPTMVTGRYREDLIFYTPKARAKIREKEMQRLSSGSSRRKQIFSSLELTESDAISLVGSSTSSSKDQQKMDSDDKSVPPPPKPKDLGQVPVYLTEHQRDLFF

SEQ ID NO: 161457 - protein, 97 aa, Heterodera glycines
FTKKFCEICRSWIDLFEDKIQVEKLMMHKRCFVCAICDCPLEPGNCSRDDGIIYCQFMCNDRVPVRFCSAHMMLGSGEKCQLLKEKWMKENEEKQEI

SEQ ID NO: 161458 - protein, 175 aa, Heterodera glycines
MSSSSSAAPSDPQQKSIYEFSAKDIDGNETSFGKYRGKVLLVVNVASNCGFTDSNYSQLKQLLDKYKSKGLEIAAFPCNQFNNQESGCAIDIKDFVTKKYNFEPDLYDKIDVNGPNEHPIYAYLKSVQGGILGFDAIKWNFTKFLIDKNGKVVERYAPTKEPKNIEKEIEKLLEA

SEQ ID NO: 161459 - protein, 35 aa, Heterodera glycines
VSPNLSSFFMRYLKINKTKNWDKIKRNEVRKRFQL

SEQ ID NO: 161460 - protein, 122 aa, Heterodera glycines
  unsure (1)..(122): unsure at all Xaa locations
DLAFGDMRYSDTYIAISYWLAIGLAIASLFYFRMKMPNAPRPIKVNLIFPAIFLLGCVALVVIPLVGKPKDTAIGIAIMLTSVPVYLVFICWKERPXLFNKASASITIFCQKLFLVSNEAEK

SEQ ID NO: 161461 - protein, 103 aa, Heterodera glycines
LLTFFLTEFSRVQKPLMPGGYSRYDQEIFQKETVADFEIETDLSFHGNAALNQRIGAAHPQNTPTALTSNGVQKADPRRPITAGVAPSVMRQQHGPGQKRASR

SEQ ID NO: 161462 - protein, 90 aa, Heterodera glycines
DREKDAQITLWVDKYAPSTFLDLLTKDETNRIVLLWLRLWDECVFEKRGGKKWEGNHRRIFQRNNANATSLWDNLEERDRTLRNVTAKGH

SEQ ID NO: 161463 - protein, 142 aa, Heterodera glycines
KDPKKCQHFKILLIVLLAVVSFRLSASTGDKKTANDGSGNNSSAGIGTKIKRIVTAGLLFTSLATGGAEAIGRSNAQGGNAAGLVPSHVTNRSMAPPPPPVQFEMGANRLEKMRAHLRELAEKMPVNESKRPSPSGPDPHHH

SEQ ID NO: 161464 - protein, 153 aa, Heterodera glycines
ALTPSTIRPAPISLAFRPFPHQFFSLTGLRPGGPRRLHPNKRSACFQPYCGASQLSLHSREQFPILSGASSSTAQQQQNNIWGQKATTDLFKNKPEQLPTKKEEPKRSKVISPPDIWPEGMPEQLKARELGLPDPHPIVPPHWLNPPKKKKKK

SEQ ID NO: 161465 - protein, 178 aa, Heterodera glycines
MYMNSMGSRGASSAAVVASAAALCLFSAMAVVVYGAESAGPKADQAMAAKQFNPSAFPAMPPELEKILPADVVQKLKAVHADMSLNIMQKQDKIDRIMSSLPGEVLDQIPAPPGFERLPDDVKNRLKQINRQTNKAWADKQKELQEYVKTLPQEQRAILMMGPMGGSPPPPPSFGRRR

SEQ ID NO: 161466 - protein, 110 aa, Heterodera glycines
DPKIERTFNELFERDVAGVLFVGTGTAANALSMAHVNRAGGIIFAHRHAHLIEDECGAPEYFTGGARLVGVSGAEGRIDPEALKEAIQRSPPNPVSMHTGRPMAVPITQS

SEQ ID NO: 161467 - protein, 57 aa, Heterodera glycines
WPGCAIKNRLAVGHRVKAISPRVHNILYEIVLRACIMVHILMSFRRKGHHQRAENFL

SEQ ID NO: 161468 - protein, 116 aa, Heterodera glycines
QRRRATPLGRPTRCLKRLPQTVPHDQAQSFAVRGPPPPPLQPPQCGRWIVPGTTTESRDEDVRRSSRGQPSLRMTPPPTAHIAAPRADKSSVQRQSQSSALPPSRQFRRLSPTHKP

SEQ ID NO: 161469 - protein, 230 aa, Heterodera glycines
  unsure (1)..(230): unsure at all Xaa locations
ANLIVPDPWMVQPVRAVHDLDNIRVASASXDIVAVFQLRHILLDGHCFEDPSGNPPRGLQFVLGTRVEPALFDTIVMANLGYFQLKAGPGAWILRLRDGRSKQIYALKSSVDAENIGIFGQTEAGANGGEGGGEGDVEELHVLVDSFSGRTIRVRVEKRKGMERKSLLSEEKDQKQQQATGAEDGTDAVDELDEEEAEEDNSIWSNLAPKKVVKKIVQQIDGHRSIVRSD

SEQ ID NO: 161470 - protein, 139 aa, Heterodera glycines
DLVLSDAPSRIGTDGKGKANVGGRARSVRRVLRLLLRRLRRPPLARTHFGRARIPKLPSHRHLLSLKLKYQMQFNRQQKKCSKYFTSIFISDWTIKRKLNFFSNKNYNYYFRLLNYIRILINFKMTNPLVFKIFIFCFR

SEQ ID NO: 161471 - protein, 32 aa, Heterodera glycines
LGGHGGLVQVVPLVRRESEIIHRRELSSTPLV

SEQ ID NO: 161472 - protein, 246 aa, Heterodera glycines
MWADDVEEFLRFKYDVYEDLHHPSSAASTLLQMLCKRQGIMDSLLVFIIENLSSTSDVRQADGALHMVAIVSSQLLKLKKYRKDVEKLLDAHVIPRTAHQNRFVRLRACYVLHYASETPFKNSRILDRAIHSLVKCLKDDTELPVRVQAAIAIQSLINDHSQKGTVVQIVRPHISDLLINVLKLVKETRVEDLPAVVDALIENFEEDVIPIAYDVTVQLVQTFHAMVVGQEDGNEEDRIAEDYSVG

SEQ ID NO: 161473 - protein, 80 aa, Heterodera glycines
SSNELFDRGYKEQRIQLKVKGHFTFCWGTFLRRLRKQQHLKQSFTSLCSSSCYDLGLGASRFPPSLLRLSLPPAGTEARP

SEQ ID NO: 161474 - protein, 126 aa, Heterodera glycines
  unsure (1)..(126): unsure at all Xaa locations
FFFFFFFWVFFFFFFFFFFFFFFFXEQGEYFTDEYYTYCTYRVHIRTYIPLYKYIRITEQWDTNMITQMTSYGDHNTWHLTAVGYAHRAEWCGRSCSGTRGNWCGSGSSDTSSGDGTDGCSRASSA

SEQ ID NO: 161475 - protein, 173 aa, Heterodera glycines
QNFAVTPHRRSDRYMCAYGVGCAIPWLISSEIFPTKFRAAAVTVAVTVAWSLSFVVSTCYLPFQQIVGTSFSFVPFILVSAGGAVFVYCLLPETRGKRATDIVREIRQRVKSISHGQSPFAEGSAEAATTTAQPNGQMSELTALLRLQRQKTLQKQQQKNSWHDGYMSMDNNA

SEQ ID NO: 161476 - protein, 232 aa, Heterodera glycines
  unsure (1)..(232): unsure at all Xaa locations
CSGEGVMVDEKDRCKKCVGRKTVQEQKIIEVKITPGMRDNQKIVFYGEGDQEPGIEPGDVVLVIKTKSHEQFERKGDDLFMKKTVSLADALCGFTTTIKHLDGRQITLTTMPGDIIKPESIRGAIQEGMPKPNSPERGNLYIIFEVKFPKKHFLDSESKYNKLLSLLPPRPDQPXIAPNSEVEEVTLTEFDPRRYDRSSGGGGGREAYHDDSSDDEVPTGPGGAQHVQCQQQ

SEQ ID NO: 161477 - protein, 246 aa, Heterodera glycines
  unsure (1)..(246): unsure at all Xaa locations
SCPFIPAFPIKMSQFGPAFAVNANNPYAHFKCCCATFNIKDHAQFCGVLSFALFLCLVLISMMLFGSLSLFYIFVGVVVYILLMKTLFGVVNKLSLLFYIFFEAIQIGFYLALMLYIIVPLLFLEIPRRNCRNVEINSEICDEPRNRSEDYVELLLFVSLLASIKLHFARVFAHFYRYLTWNEQCSVHRAQYINGRGIHITMDQPQFAASFSPYYGWDTHTVXGCDRRGQQNETNNPNQLPITELP

SEQ ID NO: 161478 - protein, 85 aa, Heterodera glycines
DSVVQQRRHSTCPSSQVGQFAPSHQLRCCYCCCSCHCPSAHHFEIGPMGKAPLQTACQLWHRFCGNNRSSPSKTNPSSSLWHFRR

SEQ ID NO: 161479 - protein, 97 aa, Heterodera glycines
LRIRTSRIRQHIVDSGFSRWGHASERPGLHPQHNERDIGCVGPPRKEMHPLSEQIPIKRAQLRQFQPSQGPEEAWSHLGIMPTMREELWNNPMTSIY

SEQ ID NO: 161480 - protein, 97 aa, Heterodera glycines
PKLVNPDELTKRTGALYYKLDLEDQVALSKRIAIMKLERNFTKEDTYTLDAQTTNDFKEKIAELFEETESDEDQARMVLEGSAYYDVEAKDGVWIRI

SEQ ID NO: 161481 - protein, 160 aa, Heterodera glycines
  unsure (1)..(160): unsure at all Xaa locations
MFPNQFGNCSKWIVHCQGGDWDRKNRLRSYEALYKMAIREMRGAALLFLLVVSTFDAYELMSYEDLTFYTVICCVDALDRPDSKEKVVNCSEIQXQLNAEPTDKNRHLPLAKQLLTTFYRSESAQFFTALVELDQYMKQDRYLRPHYQFYSRAMRVRAYQ

SEQ ID NO: 161482 - protein, 158 aa, Heterodera glycines
  unsure (1)..(158): unsure at all Xaa locations
QGNAKKLDARKMVLYSSXDSTLLGLLSVLNVKVPSNALDLPPYSACAMIELYEERQNARGNKNFFVKLFYRRNQILEPMAIAGCEAKCDLINFLQILEPRSIRGGEEELKILCDEKVPNSAARRMGNIPGFAKSLIIAIFISIAAINHGTQSTVINVR

SEQ ID NO: 161483 - protein, 195 aa, Heterodera glycines
  unsure (1)..(195): unsure at all Xaa locations
PAYGASVLDRKIERTFXQVFERDVAVFFVGTGTAANALSMAYVNRAGGIIFAHRHAHLIEDECGAPEYFTGGARLVGVSGAEGRIEPEALEEAIQRYPPNPVSVHAGRPMAVSITQSTESGTLYSLAQIRRIANIAHSHGIPLHMDGARFANAMAALGCTAAEMSWKSGVDILSFGASKNGCWCAEAILVFNDLA

SEQ ID NO: 161484 - protein, 150 aa, Heterodera glycines; identical to SEQ ID NO: 159235

SEQ ID NO: 161485 - protein, 194 aa, Heterodera glycines
PPIWEEEELSTAVSEEHIEDSEHAHSVEPTELQFLDESVADEEAVLGSEITLHQHKMEKEEETTFEEHDDMTAPKSVFGSSSFGCNKREHCKSDDEDYCHSACEEGPTEETKNHSPPEESSKEKEGEQAEDTGTGMTDIVEAEALTEPGTPLRQMDETTNSQRNEEETCPIREEEQQTKTEENSTEATEEGRRS

SEQ ID NO: 161486 - protein, 233 aa, Heterodera glycines
  unsure (1)..(233): unsure at all Xaa locations
MEAEFHNRRRHWLKVEKLYKGIFVAQLWKELEVQEGHTSFEHPEDIASLPTTLLTDLLTKQLTAVEECKSVTSMPIQLCEHGRIKPGPFIRGEIKAVNTSAARRLIREFNVNTTLYTGANICINCCSRLRDHQETRRRGRTEAILYYPEGATLFIKLNGDENDGNTTKGKKTTTGPSAAVTRRAASKGLIKIRICSDETINALKLRIYEKIDQSPVDQLXYMGGQVLDGNTLE

SEQ ID NO: 161487 - protein, 102 aa, Heterodera glycines
TPANRKRSISCIFFTPIGCTVKNHQKPPLRKRSVADGSGDRENGTAATINWAKADLSVWLNAYKNVSSPADSFAAVINSVKALAPDQWLLFKVHNTSSDNRQ

SEQ ID NO: 161488 - protein, 150 aa, Heterodera glycines
MVVAKNICRTKRPFSDLNLLLFLSFVLCSEFIPATNANENGRSAPWGRRGAFKVIAFRPRRALDILESDGFGGFRKRALDVMDGDGFGSFQKRALDSLEGDDFMGLKKKKALTTADGDDFTDLGKRALDVLDGDDFVGFRKRSEMQKIKT

SEQ ID NO: 161489 - protein, 137 aa, Heterodera glycines
WTFDNGAVPELIKLYFDGGPEDNERQLTLRMCAAPCLCDGLPCECKLTVCYVGLMDPATEAIQSQFFLENFEKDNEIANDCKQAQKKWKAFNGQVLHGFRLEYDADLHTLKVSTSINSTRKVRSNAQANDVKRANLL

SEQ ID NO: 161490 - protein, 154 aa, Heterodera glycines
  unsure (1)..(154): unsure at all Xaa locations
FGTTKKRNNAINSSGNYPIGGVELCFYFVVWLSHSLLAFLLATNASRSVGHWLDHWLEPSSYSRALRMDNSDIELKLFRQSLPNVLGAFAINSVVFRLIFRLGMSKNGRSLLLISVWFALNAYLASVRCLLLVIXATFVLLSVTLLSNCQLFAW

SEQ ID NO: 161491 - protein, 235 aa, Heterodera glycines
MVCLVMAVLMEMANSKAVKKYNKKGAVAASPAKGKASPKGGKSPAKGKAAKKLKPKKDAKGIKAKKAKPAKKSKAAKAVKGAPKTVKKLAFAKTAAQVKEIKSPAKPMVLKAVPPHQMHLMNEKVQTAVSPPAHARSLATVPYSTPVAADRNSLPSYTSDGTNLDMAHENDDYQNYYYGTEDSSREFDASAEEEDELYEEGDGAMSGQTDDYGIGIGQEYGHQSVEVPPKSVMLD

SEQ ID NO: 161492 - protein, 239 aa, Heterodera glycines
  unsure (1)..(239): unsure at all Xaa locations
MCVFWVEMRKILDTNVSYLSMGLLLYLGGHSHSHSHHGHGTHSQRQTDRTNFAEHEWGTVDGRPGQNGGNRQTHGTRRQTNINVRAAFVHVLGDLIQSVGVLFAGLLIYWKPNWHILDPICTLLFSAIVLSTTIYIIRDALVVLLEGRPSTIDFRHVFDALEHIEGVKKVHDLRIWALTMDKVAISVHLEVESAADSQQILRATTLMLRRDFNVHESTIQIEGYXPETANCGQCVVPTK

SEQ ID NO: 161493 - protein, 224 aa, Heterodera glycines
  unsure (1)..(224): unsure at all Xaa locations
MSNFIFVAFLTAAFFSSGLALPAPYDAESVVSSELNVSLLSADANVEAAITNESDAAAEIQAPSIPVPIEHQTAADITHPTETGNESSIASSSSTPKSEQTPKKVMNMKSAMEGAAANVYGWLPLDQQPKTIAEAAAKAKQTPAKLPADYDVNRVAERAAARVYGWLPEDKQPKAIYDAAEKAKNTPKPPGDYDVERVAXXAARLVYGVLPIGMQPSFAGPSTD

SEQ ID NO: 161494 - protein, 225 aa, Heterodera glycines
MLQAHQYQLRQGHRRVSARSILAHFGFEFSNDYRLGCGHYSKVYKGYFKEAQRTFAIKVTDLESVSEKFKQKFLPRELEVWRELDHPNLVYLYKDFQWNNYQFAVMELVVGGDLFLQKCGHVSETTCHNWMLQIVAALDYLHRKGIAHRDLKLENVLLCENGVIKVTDYGFSKQSSDLSSTFCGSRSYSSPENLLGIAYDMFKSDIWSLGVTAFIMITNTMPFHE

SEQ ID NO: 161495 - protein, 174 aa, Heterodera glycines
FTHKRRERKGRNHYRNKTKGVQIRRQKSVKFPSLFTHCAPTHCSLPLLFLPPHHHPLLFSFVISLVPSVALRRLRPSTTASTSTMFLPTAPAFAAPIVRHGLARHRLNSFDPFGALNPAIRHTTTTPIDGCSLTGVQLLMGLPPIVRVSEGRVPRVEQFSLALLLLLSNFVHFF

SEQ ID NO: 161496 - protein, 96 aa, Heterodera glycines
  unsure (1)..(96): unsure at all Xaa locations
PGRTFIWLDVPFCFLSIVILNPFVLSFLPYLLQHLHLHSFINVILNLFNNYFQLMIIYGVDYFCVCHCLSVILSENTNKSRCRXXKKKTKKKKNKT

SEQ ID NO: 161497 - protein, 228 aa, Heterodera glycines
  unsure (1)..(228): unsure at all Xaa locations
LTGDGTNDGPALKKADVGFAMGITGTDVAKEASDIILTDDNFASIVKAVMWGRNVYDSIAKFLQFQLTVNVVAVVVSFVGACAIQDTPLKAVQMLWVNLIMDTLASLSLATELPTEDLLKRKPYGRTSPLISRTMMKNIIGHAVYQLTVLFTLIFAGASLFGITTGLYAPLYAPPSQHFTIVFNTFVMMTLFNEINARKIHGERNVFQGMFNNPIYXPFWVFTLILQF

SEQ ID NO: 161498 - protein, 176 aa, Heterodera glycines
VIINNWWYESCKFVVFPFLKIGKKSEKRVAGGSFKIELVRLFFSVPSSKGSVPSDQFVPPRVFPSVPSDQSVPRGFRSVRSVYSPGLFRPFCFRLSPAAQNGIIACHSAFSPPSSALLNVALKSADSASTVKCPIGSLRFTPSWLNSTTLRTMVVAPHPRPFRHFRAAQTQANPRH

SEQ ID NO: 161499 - protein, 119 aa, Heterodera glycines
FFFFFFFVDAEFFSLSVLIRFFSIIRDKEIVRQNKNVFFCALPIYWFISRFLKRSVYWSSICSFSVFVLLRLLLLLLLVSLFVFDRLHIVRKPKCPSANVAKILASLRPLLLLLLRLSP

SEQ ID NO: 161500 - protein, 109 aa, Heterodera glycines
TVYVIDLAQAMDISHPSSLRFLHRDITNVLNFFGRIGCEPLPTPHAFFHEVTDIEFDPNKNLYVQVESFERENRNMDLKGAKASPANYELHLHQQESTGRADSPSRPYN

SEQ ID NO: 161501 - protein, 149 aa, Heterodera glycines
MPEGYESGRGKFEFALGYIGCSVIGGFGVGSVRGMFGELGNPQNRTLAWNPWYTRMLNAATKHGSGYAQTAGTAMFLYSVTELGLKLSRADDLLNSFIAGPIAGGLFHGLPHGLRAGGVGALAGLGLVTVWNLCDRDSRRELREILRLS

SEQ ID NO: 161502 - protein, 40 aa, Heterodera glycines
  unsure (1)..(40): unsure at all Xaa locations
EARXFLQLKEGESDRKRRNLLITPLNWQMPSLRFPPPPLS

SEQ ID NO: 161503 - protein, 227 aa, Heterodera glycines
  unsure (1)..(227): unsure at all Xaa locations
TSRPNVYLNALMMLKXGPNSQRNVLPSVVKRDFHFCHLCQSNSPPRSFHCPVCNFCVFRRDHHCSFTGSCVGHFNQRYFVAAVFNLWPVVFSCCVWNWHALLLAFSPISLSDFLKWVFPHMALLFRFVSFHQFFVILAFAFSFITLLFTTYLIFAQIFCFWHGQTRVEYLMDVHAYNLSFRENLSACLGSRWPFIFISPFIPSQLETDGTFFRTREREEIGKSTKYF

SEQ ID NO: 161504 - protein, 232 aa, Heterodera glycines
  unsure (1)..(232): unsure at all Xaa locations
GFLMKKELEYFAKALESPTRPFLAILGGAKVADKIQLINNLLDKVDEMVICGGMAFTFTKXLTGKSIGKSLFDEEGSKIINDLMAKAKDKNVKIHQPVDFVVGDEFKEGTPFANVDAKDGIPNGKMGLDIGQETLKQFAEVIGRAKTVVWNGPAGVFEWPNFAHGTKGMLEAVIGATKSGATTIIGGGDTATAAEKWGAEDKVSHVSTGGGASLELLEXKVLPGVPALSDAP

SEQ ID NO: 161505 - protein, 215 aa, Heterodera glycines
NFRSVPGRSEALPRNSPRGCESIFKRIFGEYNAEEIIQMRDEGASNVEIEEKITEALNQIRSPQKRQEAGRFAMSCRRIFAMIERRRRSADNAEHSLDQLFKSHLIWLNEQQREELKQMKGSGKGRTEMQQRVMEWYGQLEGQEKQKAREHLRDGCRDILAQVLGKEKADQLKQLREGGMSGTELEAKANEMVDQIQEEEKKAKAKEFGTVCRKI

SEQ ID NO: 161506 - protein, 94 aa, Heterodera glycines
QTRTQHFLIFFLLLICEMINSFPSKSSESGEPPANGAEVAQSRKKRQAEEVTTEEPPSETNDAEDHQSAAAGNGKAPKNKGTKNKSDSSDSSSS

SEQ ID NO: 161507 - protein, 228 aa, Heterodera glycines
LLDFVERTTRAFDANVHRVRPHHGQNLVAGRLRALLHSDLNRSEIAESHRHCGKVQDAYALRCVPQVHGVVHDTIAFVKGILETEINSATDNPLVFSEIEEVISGGNFHGEYPAKVLDYLAIAVHELAQMSERRLERLLNHQLSGLPTFLTRNGGLNSGFMTVQLCAASSVSENKVLCHPSSADSIPTSCNQEDHVSMGGFSARKALKIVEHTEAVLAMELMAACQGM

SEQ ID NO: 161508 - protein, 32 aa, Heterodera glycines
ESDDPSRAPHAEWSTRRKCCVYFRALATHVHV

SEQ ID NO: 161509 - protein, 102 aa, Heterodera glycines
  unsure (1)..(102): unsure at all Xaa locations
SRTERLAEHCREADILIAVAGLRGMVRGDWINPGAVVIDCGINAVHIPGXKRHLVGDVNRDEAKAADGFLTPVPGGVGPMTVAMLVRNTFLQAVCQKLNCRV

SEQ ID NO: 161510 - protein, 176 aa, Heterodera glycines
IRTTSPHPPVLKCRLSQALEQIQPAMAVGVQPANLHKFNSIFKRTIANWFVQSSAVDFLHLLLVCMRWLCREYEIPARYVISIHDEVRYLVPEKDKYRCALALSLSNMYVRAAISEALGIRELPRSVAFFSQVDIDSVLRKEVDLECRTPDGKTIEKGEALNIEQIVEHTNGRLGR

SEQ ID NO: 161511 - protein, 260 aa, Heterodera glycines
VAWSISFYPQIILNFQRKSVIGLNFDFLLLNVIGFSCYTVYNVLLYFDPNVQRIYIERHGQRSLIPVLINDVVFASHALLACIITGVQCFFYERGNQRISYIGRAWASLLLCFSSVSLALALFRVLNWLDFINYLSYSKMAVTLSKYFPQAILNFKRKSTVGWSIGNVLLDFSGGFMDICQMCLQATNTNDWSAFTGNPVKFGLGLISMLFDILFIIQHYVLYIKKDVNSSSSSNRVDNSHAVTATTLPPPLIAASPMDY

SEQ ID NO: 161512 - protein, 173 aa, Heterodera glycines
MSSDESTTSSASVVSVQLREVPIKDFKDVLPVLQKTLNELEHPFIKKAEEISGMEREKLFYITSSLVLLVLMLCPGNMLLSTLITVAYPMYASLLTLNTQNTSEYTQWLVYWCVFAEFCQFDYLFGSINGLLLLYVPLKTVFLLYLALPQTYGAHNLYVKHIRKVLAVTNVLD

SEQ ID NO: 161513 - protein, 256 aa, Heterodera glycines
PAGNTPEKWDYEPGLSPPISLSTTYKRNWPGMPKGHDYIREGNPTRDVLQESIATLESARHCRIFSSGLAAIAAVSHLLNSGQHVIVSGDCNGGTKNYFDKICVPHHGLELSFVDLTRLENLENEFKPNTKMVLFETPSNPLLKIVDIEAVCRMVRARSKDCVVVVDNTFMTPYFQRPLELGADVTVQSLTKYINGHTDVLMGTVVTNKEQLDQHIYAQQIYAGAVPSAFDAFLVLRGIKTLPLRMRQHMENALAI

SEQ ID NO: 161514 - protein, 90 aa, Heterodera glycines
IGRVGIVGHRERHPGSFDIVHIKDKVVKGSTNCARLRSRRSVTSKCRTLSRRRANTIRYPDPHIKAQCAICCGPTRTIGAGRRAQLLLAV

SEQ ID NO: 161515 - protein, 187 aa, Heterodera glycines
  unsure (1)..(187): unsure at all Xaa locations
EFPKNILPIWSLSSPDIQLIFQSVDRDRSGQISADELNRXLSNGTWKPFNPETCRMMISMFDSNNDGGINFQEFGALWEYINDWTRTFRTFDRDNSGNIDRDELVNALTQFGYRLSGTFYDMLMRKFDRTQSGRINFDDFIQLCVVLQTLTTAFREKDTDRDGWIRIYYEEFLAMVFSLKMSMMAKQ

SEQ ID NO: 161516 - protein, 137 aa, Heterodera glycines
  unsure (1)..(137): unsure at all Xaa locations
PPPPPPPPXPXPPPPPPPPRSPXXSPRXRPPFLXPPPPFPPLPPPPSPPPPPPPPPPPXPPPPPFPPPPFPPPPLPPPPLPPPPPRPHAPSPPSPAPAPSPPPPPPLPPPSSPPLPPPPPPPAPPPPPPPPPPPPPP

SEQ ID NO: 161517 - protein, 127 aa, Heterodera glycines
MGIRSKDHHQSHLFLMGVASADDDSVPDPIVIKLGESLSLSQLVQKIEQLQNRTVRELLVTLRRRTYKMPVGPPDPNGDRFFQNGHLLVEDVVYNWVRKTRNSIHGIVQLHVLYEGIAMLDEVNYHF

SEQ ID NO: 161518 - protein, 86 aa, Heterodera glycines
FVKTMNKIAFLPIDRMNRQSENSMSPTVFSPNVEDEHRSDEHQRHDQHGNRSNFQPGRVLSIKAPQSAAVHSSAPSSASSSSTTSV

SEQ ID NO: 161519 - protein, 55 aa, Heterodera glycines
LLAVEVSVYLTRVRIGDNSSIMPETPLRMSSTFASVDQCISVMGYQVSFGNYQGS

SEQ ID NO: 161520 - protein, 72 aa, Heterodera glycines
FLRPFAFYQSVRPSIRTVIINGAVMMKIRSLGICHWLVIIDIVQYLMTKHIIRYVPPDIVKVYLLGRWPAQC

SEQ ID NO: 161521 - protein, 104 aa, Heterodera glycines
  unsure (1)..(104): unsure at all Xaa locations
CRNSPNLLAQFDGVVHFAVNVEYITILLGSQNGVQWHSMSCDGSSSGSPFIVELSLCWSDPILPHPQVVLRLSRFIVELKGVISHVQQLQTMTKSNRXQFDVCP

SEQ ID NO: 161522 - protein, 241 aa, Heterodera glycines
LFCDFVLFLPPYILPFSFLFTTFREFNLHIFCTKIFWKTNILLMDIQKQNYTEQSLELLSQELRSILLDPNSQMPTETTESNEKKENPEDISSTVFFEHQQELLNETVSSGDEDFRCVSVTSNESEIQEPRLSTPTSQLPTETSDSSGKKENPEDISSTVFFEHQQELLNESVSSGDEDSRCASVTPPESEVQEARLLTPTSQMPTETSNSNGKKENPEDISSTVFFEHQKELLNESVSSG

SEQ ID NO: 161523 - protein, 194 aa, Heterodera glycines
HRQCCCAGSRTFVDAKIYDEFIQRSKQIAEKRVLGNPFHLDTDQGPQIDGDQMDKILQYIDQGRKEGAKLITGGKQFGGKGFFVEPTIFAGVEDQMKIAQEEIFGPVMSIIKFDGLKDLVEKANSTIYGLAAGVMTRDLDKALYVANNIRAGTVWVNCYDVFDPAAPFGGYKMSGIGRELGEYGLSAYSEARKI

SEQ ID NO: 161524 - protein, 250 aa, Heterodera glycines
  unsure (1)..(250): unsure at all Xaa locations
MVFYSEFMEFVSGENFSKALKKVDANGESESSDAKLNNANKNKRRRSPGGVSSFSMPSPVRAVLSKFLFAAFCAILLLIFGNSSDPAQIVSPWAWRMPWLQWLLLFWFLIFMQRVQYYYAWTMTDAICNISGFGFDGFTSDGKPKWDLTTTVDVWKVETAQSFKETLDGWNLKTMFWLRYIAYERMPKNYRTLSTYALSAVWHGLFMGYYLCFATGALITVAGRMSRRCIRHHFQRNAFLHHLYNLLTXL

SEQ ID NO: 161525 - protein, 94 aa, Heterodera glycines
SVFPSLPKATDRRNSLKLIIVVINELCPFGLISRSLLLIIRSLPSAPFQSADLSPPPFPRCFSLLISVFSSLSLLLKYKLDGYHGAHVLASSAA

SEQ ID NO: 161526 - protein, 199 aa, Heterodera glycines
DGPTIAQDPTPSPRRVFLRDLCSLFCCPPLPSAIVAKLAFMPPEPSYRILTSDSGRTTLELIDGRTEWPHGQDELNNVEVFFTRTQRRNKIACMFVRPFELSHFTLLFSHGNAVDIGQMCNFYLGLGCRLRCNVFSYDYSGYGQSTGRPSEKNLYADIAAALKSLESRYQIPPEQVILYGQSIGTVPSIDLASCYPRIA

SEQ ID NO: 161527 - protein, 167 aa, Heterodera glycines
WKKTTGGSLQIVLKSILCAMAPLLRIGLFAVDIFAIIGSHFYAHLSSDSSLSVITKSPDFNDAAEFVATFKSMTDASADVLDKISNIGNGAFTLLKFAGPIGQMVHIGLSIGLKQQDSPELRAIQALQRQITEQFETLFRKIDDSIVPQEYRDLMTDYQKMSLFLFF

SEQ ID NO: 161528 - protein, 210 aa, Heterodera glycines
MAEIDMAEFEGAGERYKFLIQPVKDLAANWDLDIAKTLEDYIRKVVAETKRIDAEAPDDEYRRHKVFNFAEAALLIHGTTTVYARKVDYVLQKAQNFFDQLREDENIHHQQQQKGKRRKDDPLEEGAEATGEEMDENANADDAGEGREKRQPKANQINYASLGHLLDRLIVSQRRTSLLPVVPIAFFSLTDFEKRNVSLCTRTNPTEVFG

SEQ ID NO: 161529 - protein, 209 aa, Heterodera glycines
MRFDLRDYPTPPKAKIEESVTRKFTASECVELEKDYQQMLRQFRIFLRDLLRQIIREPRFKCFHLPVDKTDAEDYYEIVKQPMCLSQMMGNIDVGLYASKDAFAKDIQLIRNNAIEYNPDTDMDSKQIRHAANALVDMTEALFSMEMDDDFPTKLEEARKLVEEAKRWTEKMESAEKDDGTRNGGREKNIVPSTVAEDERRGDVGTETQ

SEQ ID NO: 161530 - protein, 31 aa, Heterodera glycines
ASTGRRTGERDRRGRPGRAPGIQKAEVEKSN

SEQ ID NO: 161531 - protein, 183 aa, Heterodera glycines
  unsure (1)..(183): unsure at all Xaa locations
MRAILFLAMVCLVMAVILETANSKAVKNKKGAVATPAKGKAAPKGAAKGGIKKDAKSKGKGKKDAKGKKDKKAKPAKGKGVPKNDKKSPAAKANDKKSPTKPMAAVKAVPKAAENAQKGPSSAEVVAEENNLDTEAVDDLGAEESDFDQLAEDELLEDDAMDGEADELEGMXEETEMDSQMAL

SEQ ID NO: 161532 - protein, 184 aa, Heterodera glycines
MASSLTIEKRCKLFNTKQMECQFDGTEAGKCAFCVKLPCKFGAVNCAEEVSISCVNPQELEKCCKARDNECCVCVLCEKNKVMKVLVECCGKRTETSAEAGKALCICVPKIGGGKCGGQVQVKQCDAKLVDECCAANTESGDCCCVCLSCNDQKCVVTVRCPAGEAKSTGPTCTASKCESVKCC

SEQ ID NO: 161533 - protein, 153 aa, Heterodera glycines
MNGQLALEVLKWKNGCEIVALYFGAHMSQRCREFIPVLKQFYDQLKKSPETMPFEIVFVPFDRSEDEFRNSLRDLHDDWLYIPYGSVHINPLAARFNIINWGVIPTLVVLKEDGTLITMAGQADVQYSSASEAMARWRSTPNPESGFKDFSKF

SEQ ID NO: 161534 - protein, 29 aa, Heterodera glycines
HSLSLSPFPFFLHTLTKNANSPHSFCSFS

SEQ ID NO: 161535 - protein, 166 aa, Heterodera glycines; identical to SEQ ID NO: 159756

SEQ ID NO: 161536 - protein, 54 aa, Heterodera glycines
HSNAQRCGRAQRGANARRRYPRDAGGGGPFSEWSAESRIDREGPSEKQVVVEVQ

SEQ ID NO: 161537 - protein, 67 aa, Heterodera glycines
MEHKWRRATRYARPIQVTTEEPPSKTNDANDHQSAAPGNGKAPKNKGKKNKSDSSDSSSVEEFVYRK

SEQ ID NO: 161538 - protein, 239 aa, Heterodera glycines
  unsure (1)..(239): unsure at all Xaa locations
GAVLSLYASGRTPGIVLDSGDGVTHTVPIYEGYALPHAILRLDLAGRDLTDYLMKILTERGYSFTTTAEREIVRDIKEKLCYVALDFEQEMATAASSSSLEKSYELPDGXVITVGNERFRCPEALFQPSFLGMESAGIHETSYNSIMKCDIDIRKDLYANTVLSGGSTMYPGIADRMQKEITALAPSTMKIKIIAPPERKYSVWIGGSILASLSTFQQMWISKSEYDESGPSIVHRKCF

SEQ ID NO: 161539 - protein, 123 aa, Heterodera glycines
  unsure (1)..(123): unsure at all Xaa locations
EQKKFPDAXGDLTPLLTSLLTAXKAISSAVRKAGLAQLYGVAGNVNVQGEDVKKLDVLSNELMINMLKSSYTVSTLVSEENEQVIEVEVSGTQGKYIVTFDPLDGSSNIDCLVSIGTIFGIXQ

SEQ ID NO: 161540 - protein, 174 aa, Heterodera glycines
  unsure (1)..(174): unsure at all Xaa locations
QNPEQIREMIKETAIPPTVLRVHNERAKESLQLVNNEYLTKASVHFDTTPLHVDYRVLGPPATLYRNNHRVTPATSNCEWRPGDALVNAQIGTWVAYAFGNPVGDSVRRLGLTETMWRNFVDKYASEMRNKGIVCVPPVRVSICWYTSVNEVLNILHKEALNGXVEFCLIGHAK

SEQ ID NO: 161541 - protein, 171 aa, Heterodera glycines
MPKSKELDALRIRFEYLSALLELLDALFPSIESLLSNSNDIETRFVPDLKRSNLLLPKCIQLNKMISNTICVGSQPSDGFDSDFSWLPVFDANSSLYFGLPSFPRKSRLLPRVGACEYFNNLLEKILFVVSNLPEIPLTVEGIIELLQQIGEDDSCVLIRSLTQLLIMPND

SEQ ID NO: 161542 - protein, 82 aa, Heterodera glycines
GAAKKQERERERERDRETTAKEKKERKRSRSREKKRDKDEEKSSKKSKKSSSSDLSHSPKKAKKEPQTPPSERTNASGKGKE

SEQ ID NO: 161543 - protein, 133 aa, Heterodera glycines
MPNIFKILLIVLLAVVSFRLSASTGDKKTANDGSGNNSSAGIGTKIKRIVTAGLLFTSLATGGAEAIGRSNAQGGNAAGLVPSHVTNRSMAPPPPPVQFEMGANRLEKMRAHLRELAEKMPVNESKRLSPSGP

SEQ ID NO: 161544 - protein, 251 aa, Heterodera glycines
  unsure (1)..(251): unsure at all Xaa locations
PEKWDMNTVVPPISLATTYKQQFAGMPKGHDYARGGNPTRDVLQQSIAALENARHCRVFSSGLSATAAMANWLHSGDHIIASDDGYGGTQRYFRQISVQHHGMELSFVDLTKLSNLEKEFKPNTKMVWFETPSNPLLKVIDIEAVCRAVQSRSKECIIVVDNTFMTPYFQRPLELGADVVMHSLTKYINGHTDVLMGAMVTNNDELDQHLNSQQLAAGAVPSPFDVYLVIRGIKTLHLRMRQHMENAXAVA

SEQ ID NO: 161545 - protein, 92 aa, Heterodera glycines
RNFSSTEFSSQRIQNKLFANSSSISSDGRELQIEYWTSLGYPFPSSSTAHCNYISPNDVGHSNNANVGSKFSMKASVRTLSIVREPMSNLLS

SEQ ID NO: 161546 - protein, 73 aa, Heterodera glycines
PAACLLLALRMKGIGEWGPVLHKYTGFKHSDIEPLMWRLNRMIIERKQHYPDLDTVFLNIAMKFSSKWRRLSS

SEQ ID NO: 161547 - protein, 120 aa, Heterodera glycines
  unsure (1)..(120): unsure at all Xaa locations
QNGGPPGGPEIFISFKTGGKPPRGXFFFFFFFFKFFFFFFFFFFFFFFFFFFFFFFFFFFFNNYLFFLIEKAFLKLSQLNACILSVFDQFFDFSSTSHFRILKQYKLDQSTLLLQQDNGR

SEQ ID NO: 161548 - protein, 237 aa, Heterodera glycines
  unsure (1)..(237): unsure at all Xaa locations
DVARLFPFYCSYCSIMELLLPFYXKLFPRMMPSTFQDTSNSEQQYKRQLKAKNETAKFLQDSLEEIALARQEQGHAHGAQAIEFAQFLKKVRTGEGGYVNNQELFKFSKLFEDELTLDNLSMVHLRALCRLLGIAQFGTPEILRFRLRMKLRELKADDQLIEREGGVEVLSAQELQAACRARGMRALGLSEERLRQQLRQWVELSLDEQVPPSLLLLTRAMYFPXDVDFTARIRSIG

SEQ ID NO: 161549 - protein, 82 aa, Heterodera glycines
IRHEVFVLLFPSRKMNDDEVVIASLPLHPQKNDVWVMKAKKNVWGMMASLVMMRRNDAVIVAFQQGTHIHRFLHYQRHRKKM

SEQ ID NO: 161550 - protein, 92 aa, Heterodera glycines; identical to SEQ ID NO: 160901

SEQ ID NO: 161551 - protein, 51 aa, Heterodera glycines
YCPHFAVGCCVRLSDVNLTSLFHASEMDIARARMKSSESYGMKYCAPGTTI

SEQ ID NO: 161552 - protein, 102 aa, Heterodera glycines
  unsure (1)..(102): unsure at all Xaa locations
FFVRKFSGECAKSKVKKKKGWRKKKKAKKEEGKRKRKKKRRKRNEKETEEKEEGKRKRKKKSRKRKKXKRKRKRRKRNEMETEEKEEGKRKRKKKRRKRNEK

SEQ ID NO: 161553 - protein, 178 aa, Heterodera glycines
  unsure (1)..(178): unsure at all Xaa locations
NGRNYVGPQEIAVVPHGVRFSVDVSVPSRGYLLEDFXRHFQLPELGPIGANGLANAHCFRIPTAWLEERETHFIIINKLQGQLFAAEQNHSPFDVFAWRGNYFPYKLYLRHFMSANEXAFDHCDPSIITVLTVPGLRKGVELANFVIFPPRWFVADGTFRTPYFHRNCLSESMGLIDG

SEQ ID NO: 161554 - protein, 212 aa, Heterodera glycines
NKAAVFFEEGKYDECIEMCGKAVEVGRENRADYALVAKAYARMANSYKMKDDPKKALHFYEKALSGHRDPDIVKKHKELAKEVKEMEQKAYIDPELSDKEKNLGNQLFKKGDYPGAMRHYNEAIKRNPDNAVLYSNRAACFTKLMEFQRAVDDCDLCLKKDPSFVKAYIRKGAALSAMREFGRAQKAYEDALQMDPSNHEAMEGLRTCMQSN

SEQ ID NO: 161555 - protein, 129 aa, Heterodera glycines
MKFICSKKKKKKKKKKKKKKKKKKKKKKKKKKKKGPIKKKKKKKSFWLFPPVKPLRISGPPGGPLLGKPPTGGGPNLGFFFGAPKKLGEKPGNTCSLGRKLFSFKIPPNNKTGKHKRENPGGPLGGPPP

SEQ ID NO: 161556 - protein, 247 aa, Heterodera glycines
QSGGEAAAAIRVLVTGGTGLVGSAIRQVVTEEEQQQKPQRLQEQWFFVGSSECDLTDLEQTRALFRHVRPTHVVNLAAMVGGLFHNLRHNLQFFVKNLAICQNVLQCCHETDVERCVSCLSTCIFPDKTPYPIDETMVHNGPPHDSNFGYSYAKRMIDVLNRGYAQEHNRKYTSAVPCNVFGPHDNFNLENAHVVPALIHKCFLAKRDGGPLVVAGSGKPLRQFIYSLDLGRLFVWAIREYEDVEPI

SEQ ID NO: 161557 - protein, 193 aa, Heterodera glycines
MPGPYPRNEEERRAAAIKYGLRPEDYKPHHPLDFVNHIGDYPEIGVVTYEQRDPYDNYSHTMHRRNWNEPVPRQFTRYRYDRWSYTGLDEENYEPREVLRTLLMYFVPVFLLAYWLIRTPEDPFYWFKQKYEPVYRPRVMPRQYPYDYFRAWPFEEYTKYPVLNYTFEPADEGFDPKEAEVKHPFNETSRVPL

SEQ ID NO: 161558 - protein, 168 aa, Heterodera glycines
LGLELVLKLRSCSGIYLFDRAIVCSFFPWIIYWIKRRNSHILTGFTFRRRNISYTDLKMTIPRFSSPFYHCSAVALDALYRWSIKVCLPHFLGVDMLLIERGEICENFVSEMVDQGFHMCVWTVNDKNEMAWIAHKLKIPFLTDFPHKARGVLDGANGVPTELTFELN

SEQ ID NO: 161559 - protein, 104 aa, Heterodera glycines
  unsure (1)..(104): unsure at all Xaa locations
FFVRKFSGECAKSKVKKKKGWRKKKKAKKEEGKRKRKKKRRKRNEKETEEKEEGKRKRKKKSRKRKKXKRKRKRRKRNEMETEEKEEGKRKRKKKRRKRNEKET

SEQ ID NO: 161560 - protein, 214 aa, Heterodera glycines
RNWHSFDKVDSTIEKKLSDEYAVKGFPTLKILRNGRRFDYNGPREADGIVSYMLDQAKPAAKRLNSAKEVLKFMSPSDVTVVGFFSSESGAFYEAFADAAERTRGDFAVGYALDGAIAQHFGAKFGEVVLFWPEIFHSEYEPKRKIFPRETATSEELVSFWRDNAIPLVGQMTRANSATRYHRRPLVAVYYNVDFSLAYRDGTQFWRKKVLAIA

SEQ ID NO: 161561 - protein, 86 aa, Heterodera glycines
  unsure (1)..(86): unsure at all Xaa locations
PPPKKKTPPPPKNLGARPPFWXFLGQRPPLFSLGGPKSPNKLKGSHCIENMQXKAKERXXNXERDLPHLLXXKSISPXXCFFCRTI

SEQ ID NO: 161562 - protein, 80 aa, Heterodera glycines
MIQSPNSDDDSLKTLCYQLLVPTSAANIGFAIGDFQIHVQPEMPEIINFVVPELIPLLKHTMKSLNRIFVFFEELLSCRF

SEQ ID NO: 161563 - protein, 129 aa, Heterodera glycines
HLNRFLRRTRDCDVVEWAYCFDVHLNAFFPLLILLHVILPLLFYGLVDYQNFLARFFGNSIWCIATIYYNYITFLGYTALPTLKNTQFFLYPITFLFIFFVAATSAGWNVSITAMDFYHFRVTNADRRG

SEQ ID NO: 161564 - protein, 250 aa, Heterodera glycines
  unsure (1)..(250): unsure at all Xaa locations
HRRFNCIVDEHFKTRKWKLGCMRICPKLXENGTKQLQIVNSDAKPLPIPQNPLPNKVIGFRHIQIHYIDQNVIAFLRRFHRRIFDVCSMVLYIHTDNDRILDYFLLNIWPMFRHSMRLMNLNSISLRRLRQLAGPSLLSDCPSLRFVSFNEAILPAFPPDESANASDGQALAKWLFTPRPDGQFKWFRGFVNSPDQWSPTMEQLKTAFSNASSPITYRISLAFSSTSIDSVVPFDDLINEVTGGEIDTGT

SEQ ID NO: 161565 - protein, 107 aa, Heterodera glycines
EERCSIRRSRPREINLSGAKTQGLGLTNQAQVKWFYLIHDTKVLMRLLCQRNLIIGINRFRKYPMWSVMGISHPLYYRCVVPGAQHFFPGNLSISSSPSQFHLNRIK

SEQ ID NO: 161566 - protein, 264 aa, Heterodera glycines
  unsure (1)..(264): unsure at all Xaa locations
YCRDVLRYENETLSRQPECEPLLTDWIHXAAFRSNTVGLSRYCPNKLVDVVNSGHILSFLSQYYTSPRIVLAGVGVDQQFLVDSGKELFDPRETTWEKHPERLLTQLPPVDESLAQYTGGEVLIEKDLSQMALGPTPFPNLAHIVIGFEGVNVSDADFVPFCVLQSLMGGGGSFSAGGPGKGMYTRLYVDVLNQHHWIYNATAFNHSYMDSGLFCIRASADPTKLNDLVDIILAEFGRLTKGAWLDELERAKXQLKSQLLMNLE

SEQ ID NO: 161567 - protein, 131 aa, Heterodera glycines
  unsure (1)..(131): unsure at all Xaa locations
CSSSSTVPFSTTPIKMARQMKEAGKPSYKLYVRRMLKQTHPDKEISTRVLNIMESFLNDLMDRIATEAXLIALYNRRKTMNLRDMQSAVQLCLPVGMATRANRKAYDVVAQYNAARKRKGILGQFCSWLGF

SEQ ID NO: 161568 - protein, 120 aa, Heterodera glycines
  unsure (1)..(120): unsure at all Xaa locations
TRRRRASSSKKVDTKSGPIPSPLEAFLKPQLNNAMSDPSQNCLILLQVLYGLNTFWWRIFDANDADTDEDDNDAADEEEGSDGEEETTDEVEDNEQKQPXTNXPPITHRPIIAPSFFYSP

SEQ ID NO: 161569 - protein, 46 aa, Heterodera glycines
HPFGDLSGGIEETLSERVLNQDEIDSLLGFDMGDDDGSERSGIRAI

SEQ ID NO: 161570 - protein, 82 aa, Heterodera glycines
MRAGEPRHLSPTRGMYTVYPNYNNGFRTIELFLDHYLRTGTSVTTERFVTLRKAVHRANWELSHSSITVSSELGRGAFSVVK

SEQ ID NO: 161571 - protein, 233 aa, Heterodera glycines
MPQNEHIELHRKRHGRKLDHEERTRKKLARAVHDRSKVAKKLRKGKAKLYHKKRYAEKVQMRKLIKQHEEKKQKGTTDTQTEGAVPAYLLDRQKETAGKALSTAIKQKRKEKAAKYQVPLPKVRAVSDAEAFKVVNTGKTRRKGWKRMVTKVTFVGETFTRKPAKFERFIRPMGLRFKKAHVTHPELKTTFCLPLVGVKKNPSSQLYTSLGVITKGTIIEVNVSELGMVTQGG

SEQ ID NO: 161572 - protein, 38 aa, Heterodera glycines
ERIYFLIFFNFKILGRDSYFSTLLSYRFTINKLLITLP

SEQ ID NO: 161573 - protein, 174 aa, Heterodera glycines
  unsure (1)..(174): unsure at all Xaa locations
YTHLASFTCATAKDGAINGFTAGDGGLTIGSDATNATGAIILFGFQTSNKKDLSFKVFAPTSASCLSSVNNFVISGRICKLEALETETESANCPEEDSAGSGCNSRSVTCQMTTKEIAESDDGRVFKVDLGNLTQVTSLCTKWKAHFTNVRQVMESSGGGEPRVSTRTXAAGGG

SEQ ID NO: 161574 - protein, 234 aa, Heterodera glycines
MTSPFHSLVESQREFFRTGKTAELAHRRQQLKKLRKTILDNSEFLCEAVQKDLKRDAKLNYPLEISSVIIEIEYVLDNLERWTAPLNVEKTFTTLLDSPQIVREPKGVVLLIGPWNYPLNTLLMPLVDVLAAGNTAILKPSEVASNTAAAVDEIISKAFDRNYLAVVQGGIEQTGELLKEKFDHIVFTGSALVARHISRAAAEHLTPCTLELGGKSPVFIDSNVDLPITARRLA

SEQ ID NO: 161575 - protein, 57 aa, Heterodera glycines
  unsure (1)..(57): unsure at all Xaa locations
XQVVLRHPGLALLREMFELNGCCSWDGAAHPNPHADRRGCPPGHSRSGPAAVMPKFT

SEQ ID NO: 161576 - protein, 112 aa, Heterodera glycines
  unsure (1)..(112): unsure at all Xaa locations
GHYGCCPLPXAICCMDHLHCCPEDTQCDLPQQKCVNSDGNSQPFHRKMPAKTQNGETVEQKGTDKEATEEVICPDGSSKCPPRATCCPLGDGFGRRRKDWRLETNAQQSISY

SEQ ID NO: 161577 - protein, 184 aa, Heterodera glycines
MASSLTIEKRCKLFNTKQMECQFDGTEAGKCAFCVKLPCKFGAVNCAEEVSISCVNQQELEKCCKARDNECCVCVLCEKNKVMKVLVECCGKRTETSAEAGKALCICVPKIGGGKCGGQVQVKQCDAKLVDECCAANTESGDCCCVCLSCNDQKCVVTVRCPAGEAKSTGPTCTASKCESVKCC

SEQ ID NO: 161578 - protein, 122 aa, Heterodera glycines
  unsure (1)..(122): unsure at all Xaa locations
MDQIGGTFSDQIWLDTLAWIGRGEVGWHLALVNARFAALVNMQLQQRXWCLEEFHIXERKPKRTGAEVLSLANNGSYFSLPLATSPLPDSVIGFNGTFNIWYLDAEVINFLQRFRRLFNTYI

SEQ ID NO: 161579 - protein, 210 aa, Heterodera glycines
MESKFGEVNQWWNDAKWRVGELEAETAHRSHLLDRAHHRIGELERRLANNLSFEDLRREKETLEGRVAELTKALDDAKWRVGELEAEMTRKDNFEEQKRKLEWRLGEMTQWWNDAKWRIGELEATLGHEGSARNNRGEGNGDDNLETLGRFRELLSDGILLIRKQSHLDRDKWKMMKYEHALEKDVRLRSCWFQVDSERHEVFLIGTFVN

SEQ ID NO: 161580 - protein, 97 aa, Heterodera glycines
SLNINFGFPHFDAAFPFPSLPFHSLPFHSIHSFIHSFIHFSYSFSVGLPCFFYWSIVPPFFFGSFWTMQKNDDAHTKKKSLSAAIVGFWCSIFLRLL

SEQ ID NO: 161581 - protein, 216 aa, Heterodera glycines
MQLLATDDYYFIKSVKTILKCCRTTANISVFRHCDLAALEDFELLGDVFAFIGKITVDDISYLLLVSECSEIAEIETVNATLTRVERVCALPVLTDGMIHKKLFDIPSLDGFERLKNRPRNLLKLMSHKVPIKNLPTSPKLIDEIIAFFNQPKSFYFSHNFDITKTLQQSGCLGSSTSDNRFFWNKNLLKEMFVNDGSPIPAFKEWDTPLIYRFIE

SEQ ID NO: 161582 - protein, 83 aa, Heterodera glycines
GIKDHIIQFDNYRSILCSSVRSIHGPNKDVGRVLSASDAVIPVPAFPQAVCAGVPTLFRLYHPPFHMAQNKVSGSSDQCGNMG

SEQ ID NO: 161583 - protein, 218 aa, Heterodera glycines
  unsure (1)..(218): unsure at all Xaa locations
MKRMSSMFKKENDQKNILEKISELEKQTQKKGFLKFQENCWDSFAXYKDIEISGDKSLIVQHKGNDWPSVFAKYPIVLNKHLSDFFYYEIPVMKKDERHYGLAFGFAVKQQTKLDVDIRYKKGTYAYESDGYLCINGGGKGPNAEYLYGAGDTVGIGVNSATRQIIFTKNGLRLDTSDFFVDPSFADDSLYPFVSLLDSGDKIEANFGPNFKFDLATL

SEQ ID NO: 161584 - protein, 138 aa, Heterodera glycines; identical to SEQ ID NO: 161031

SEQ ID NO: 161585 - protein, 139 aa, Heterodera glycines
FAEFVVHFWVKCILQNKFETARNFLELGVKRVTLLPETEPTILLSFYCCYAEALFHTGDIERALDYAKRAQKLSQGSDIDAAVRAYVRDFSRQIERDTLRASVRSNNERTASSSSSTSLSAEGAEGTEKGISNWLWPFK

SEQ ID NO: 161586 - protein, 229 aa, Heterodera glycines
MFYGTHPWVLFIRLHAIMCDRLAKIKRRTEELAEEYHVELAIRERQKKLFEEKGDSVEAQLMNAVDVHLGLRDLKKPLQNPENFYQIMLQEMKNLLDGQVDASKFEDTLRSMFDTRAYVLFTMDKLVNTLVRQLQNFVGDSASGQCVEQFEKYFDQRVNGCESGQPAARVDKDYSEAMEKVLLNQHCFKMFFFNRDHPVVTIELIDTDETESEEGRGVPMWWHCTIGSI

SEQ ID NO: 161587 - protein, 52 aa, Heterodera glycines; identical to SEQ ID NO: 130690

SEQ ID NO: 161588 - protein, 224 aa, Heterodera glycines
  unsure (1)..(224): unsure at all Xaa locations
LTMLAFSLFPNFLLLLLAICHVHGMFGRERERKSEEKRTNSRSSSRENREPDNGILSIEVVPSLAGNPLHGYRFVVRCGTLKFREYSRAESEELRWIYPTKEPEKVEIQLTKERCVNMAVFIFMTTRNQTDTNLWNKQFQANTSSRHLSVDFVHYSKLTVSPNLGQVVRQSYYVQVRCANTTKGPGCAFPHRIQIGDWWLCCWRTRIVWVFTXKLWGGVXQTKS

SEQ ID NO: 161589 - protein, 258 aa, Heterodera glycines
ALETDQTKQSKETNDQRTKTIDQTKPKEEINVQKKPEITDQSNGLDKPKEALTDQSNKKEHDINKEQINAEKMLKDVIADHGKLKALETDQMKKNEEIDGQKTKMIGQTKPKEGINDQEKPKANSTDFMKPKEETNDQEEPKTIGTDQIKPKEDAANTSVKSKAVIIDLGDPKENNVNDRKKTTTDDKAPKVMPFAQTEKSLHKINDQIDQRIKPREENRDHIKQSRANTEHPLPGQRIKPTKFKKPFDPLSTVADTL

SEQ ID NO: 161590 - protein, 203 aa, Heterodera glycines
MSDHPDAALADLSCVANDVWLDTLFWIDRAEVGTKFALIDARFGRLVATHFKLRKWKLGELGIHRAPSGWDRGGTAAVTVMDDHPLMNRLPLAKCPAPNGVIGFRAIYIWYVDLEVITFLQCLQRVLNLGTALQFTIHSKDVRCWALMSQRIWPLIAHAVTTLHDMKDVDFALLRRHVSPNVLFDCVKLRVITNTHMFPVQPP

SEQ ID NO: 161591 - protein, 161 aa, Heterodera glycines
AIMKCTGEKALGCVIAPELAKDTNNDGQKLLKTVRRQWLIFPNAPNDPIDLLANANPYSRLFADSAKKRDEPKSRHNLTFNSTADDPIATEKDADQTSNWAGAHDTAFLSGTLSSNQRIECGTQQIRYEKGVRTALYFSRGKSNAFVTHAICAKENSLSTH

SEQ ID NO: 161592 - protein, 61 aa, Heterodera glycines
  unsure (1)..(61): unsure at all Xaa locations
ENGAQQMDNLILSLLFDGFVKEIGAHFGVETNIVDDCGVPRMFLVALXTSFKKWRKRGGNS

SEQ ID NO: 161593 - protein, 94 aa, Heterodera glycines
PNFFFNAYINNSIWLKFLITAFLFKIACSKFGSSENKGLFFYFGYGSNLLEERIHVQVKGATFVAIGALKGYRLAFVDFEEPNRWHSAAATIEQ

SEQ ID NO: 161594 - protein, 206 aa, Heterodera glycines
MFFKGLHGDVSFDDLWELHKERQAEVLMERYYRADKSKGEGPITFCAFVWRLVKCTWEWQICSILLSVLVVFCLYANAVFLRVIVTFVDLGFPLWLSMAALCVLFFVDFTGKVMLARRDFDSFIALLSLRSIISCAILDKLFKLSSSARQSFSTGEVVNFLSTDLFRISYFWLTIRSFVYCPFMIGFASFGLWMELGDEFCGSVSP

SEQ ID NO: 161595 - protein, 124 aa, Heterodera glycines
  unsure (1)..(124): unsure at all Xaa locations
ERRRKRSRKQEAEKKENEEQKPAGKKEKRAAEKEEKKSESKEAEKKENEEQKPAGKKEKRAAEKEEKKTESKEAEKKENEEQKPAGKKEKRAAEKEEKKSERKEAEKKENEEQKPAGXKKKKKK

SEQ ID NO: 161596 - protein, 155 aa, Heterodera glycines
  unsure (1)..(155): unsure at all Xaa locations
FCAQVCRTNHYYLFSLAISDLLLLVLGLPXELHGVFGAVYPYKFXEFICXGRAFLIEFTXYALHFDHSLAFQWKRWLAXLFPVAHKKFLNFWTGPSKTIPRLLFWLFWAGPRPLICWGTQYACSQGATYKPFGCPSVLQPAHFLCGPQNCPRGFL

SEQ ID NO: 161597 - protein, 175 aa, Heterodera glycines
MPSEYGIETDSVTLQRFVLNEQKKFPDATGDLTTLLTSLLTAVKAISSAVRKAGLAQLYGVAGNVNVQGEDVKKLDVLSNELMINMLKSSYTVSTLVSEENGQVIEVEVSGTQGKYIVTFDPLGGSSNVDCFVSIGTIFGIFRKASNTSTKEEDTLQTGRKMVAAGYALYGSATM

SEQ ID NO: 161598 - protein, 42 aa, Heterodera glycines
VEVARLGPGPGLFLHLFDFLFRHDGCVLFVEETGGLTNAEKA

SEQ ID NO: 161599 - protein, 83 aa, Heterodera glycines
  unsure (1)..(83): unsure at all Xaa locations
QQSEARFQLFVRGFKHTKYWFDQWXQSPEKTLPKPTQVELQLPSEKMVILDYIIRNTDRXNDNWMICYTPPTAEAQSPEWART

SEQ ID NO: 161600 - protein, 189 aa, Heterodera glycines
  unsure (1)..(189): unsure at all Xaa locations
MIGGILEDIWTRFIDLVEDISDQYDDSEQPTIIHHEPATPTTMFDNYGPIEKIVVVGTGLMGSGIAQIAVESGVKVCLVGRSQEKCDQTRLKINTGVQKSIKKRMANETAEAQQQLVEATMESLELVANLDEAGLSDADIVIEXAVVENLKVKQKLFTELEAKVSEKCLLVTNTSSFLLEDVSCKMGAA

SEQ ID NO: 161601 - protein, 108 aa, Heterodera glycines
  unsure (1)..(108): unsure at all Xaa locations
GGVLAHATLPQXGKLHFDDDENWVFMDGRKIGNHRFTDLYWVALHEIGHVLGLSHSNIETAIMAPFYQDPRDLVDWRGNYKRPELTHDDVRAAQQIYGKRYGRLGTSN

SEQ ID NO: 161602 - protein, 129 aa, Heterodera glycines
FRWSKGGVKIDPKKYSAYEIEKITRSFTIELAKKGFLGPGVDVPAPDMGTGEREMAWIADTYAQTVGHTDKDASACVTGKPIVAGGIHGRVSATGRGLWKGLAVFINDEKFMTKLGLTTGFKGKTFIVQ

SEQ ID NO: 161603 - protein, 246 aa, Heterodera glycines
MNLRILLFFAVFIPSARSFYLPGLAPVNFCEGKDKKPTCPNKVTLFVNKLDSDQSVIPYEYHSFDFCIGSEQESPVENLGQVLFGERIRPSPYEINFKENKQCSYLCEKDYKSSDKSHQEKLRLLQRGMKLNYQHHWIIDNMPVTFCFINQQNMNVCTTGFPMGCYVTKEGKPKDACVLDGRYRQQDSFYLFNHVDIKIEYRDMSDDPNFLDEKIGGRIIRIKVQPRSIKHESKAGMNCGMEAAPQ

SEQ ID NO: 161604 - protein, 232 aa, Heterodera glycines
  unsure (1)..(232): unsure at all Xaa locations
YLYLATEEKVSXFRLGQCALYGSDCVRCARDPYCSWSIARRQCFPTDSSHSGAVGWIVLGTRPTATFPSPADEVTERCAKYTKTVAVTVFPGDSVHLKCPSEGQMAQWKHNGRKIPSDEEMPHFVHSMSGGLVLINATETMDGTYECATEESANGKVPLAIYSLKWDGRXCARPKSVEQFRSAQREWCRRMDTYRSNLSKWESIRDANGQGKDLCDTNAETERRTDSGNFVA

SEQ ID NO: 161605 - protein, 86 aa, Heterodera glycines
GCFLVLRFVLPSPLFLLSLSSFVFCHFRPHFPPFLQKASVEQRRQYNRIVTSQNDTKAQINSNVYNWASNAGVASDYNNFTSEQKQ

SEQ ID NO: 161606 - protein, 197 aa, Heterodera glycines
  unsure (1)..(197): unsure at all Xaa locations
MGQINLCDDVWLDTLAWINRGEVGMKFALVNARFNTLVDRHFEQRKWCFGEFHICERMTEESGAEIMTSIDGSDFSTLPLPTTPLPDSVVGFQSISIWYINEEVINFLCTIRRLLAEDIALEFSTYFTEYRSWKVMARHIWPLLRDGISTLFLKKCDXGHAPXNTCRPPCCXDCAGLHRIHTQMLPECPSADGAVDG

SEQ ID NO: 161607 - protein, 138 aa, Heterodera glycines; identical to SEQ ID NO: 158760

SEQ ID NO: 161608 - protein, 142 aa, Heterodera glycines; identical to SEQ ID NO: 160068

SEQ ID NO: 161609 - protein, 272 aa, Heterodera glycines
  unsure (1)..(272): unsure at all Xaa locations
SPKIPFLTFGDLAEQSCKVSFGWIKNYGPLAKNIVNIITIVHQFGICSMYYLXIASTFQTVFDKEKADNEPKGKDPTWFLVILLPIVALNSIVSMRILSIMCLLGNVLMITSLTLILFMLSQIVFTERAHSIPFALPSAEGFFKACGTIIVSCLAQSLVLPMENKIKKPSQMLGPFGVLSIGIAISTIVYAIVGFLGYSAYGESLRDSVLNHLECVSNAXELTVLTYIIRIALCLSIFASFMLXMFVIVGRLWPLLENGSKTFSYLENWHSF

SEQ ID NO: 161610 - protein, 119 aa, Heterodera glycines
MVIINGMLIFGSFSLSHFRFHSFALPSFSFLRLKQNAMANCRADQSHGNKNHHKVMANAGLSASSTPSRRRHSKGNFHIGKDNVNAILQFWRYRHRRVLGVWRGRRNRSVHRIWGGVLA

SEQ ID NO: 161611 - protein, 89 aa, Heterodera glycines
IFSSDPSQSLIVRWTELIMVVDNLGASMSCHKAGICSSWTLRAVSARMICSHVSSGWSFALSIVACRISGIEIESGPIRMVLPSGKCQF

SEQ ID NO: 161612 - protein, 263 aa, Heterodera glycines
MNFVSEEELQKQREAGEEKPESSEPVDKRTLYERLKEQKDIKQLEYDETHALKNQFRGIDEAESDFLTQVERAKEEQEARKRKEEQELVRLSRQLTQQHATGATTDKQQHALLEKPQKATAAASSGISRQAALITSLVRRKRPLSTDSEPKSARGEVPSPPSSSDSDKRKTNTVEGFRAVRHQNNGTNRIAKSLECFPAYRTTPIRVTRPRVAATARVWSRDCHVWQFTRVKAHQSRTESVEMDTNERDEDMLFMTYFCEIRS

SEQ ID NO: 161613 - protein, 99 aa, Heterodera glycines
CRRFPPNKKHQILEEEMKPSFNFKLFASVFLVLCVASLVLCQHKPAAACKPPKNVGRGNLALTRWWWDGRSCKQFIYKGQGGNTNNFPSKKLCDQVCKP

SEQ ID NO: 161614 - protein, 246 aa, Heterodera glycines
MRTIVYFKLLQIVLGLAFVWQLLSFHQFCGTFVCPKAFLHDISVGHCKRFTLIGKDSKTGEFGAVLDERKWHNQLFMSSTNGLPIKEQQQQFMDELAAKLPCPGRHCIPITTPSFFFWTEKNRNLFDNVMDSFSGQLLLALCSLLTIGIGFARMLRPAAEYECFDYCMALYSVFCWCCSAWASSYLLLYWTPYWSCMNFRADDTNVPLVTFVFDIVMVCSFVFEMFFNNSLVKKRPEMLQSLPLIA

SEQ ID NO: 161615 - protein, 210 aa, Heterodera glycines
  unsure (1)..(210): unsure at all Xaa locations
MRTIVYFKLLQIVLGLAFVWQLLSFHQFCGTFVCPXAFLHDISVGHCKRFTLIGKDSKTGEFGAVLDERKWHNQLFMSSTNGLPIKEQQQRFMDELAAKLPCPGRHCIPITTPSFFFWTEKNRNLFDNVMDSFSGQLLLALCSLLTIGIGFARMLRPAAEYECFDYCMALYSVFCWCCSAWASSYLLLYWTPYWSCMNFRADDTNVPLVT

SEQ ID NO: 161616 - protein, 274 aa, Heterodera glycines
  unsure (1)..(274): unsure at all Xaa locations
PFLFAFSLFISAFFFVYSADESIKPPTRNVLITAEEEKQRDVEGFLAIKAIHAVLDDDNSGSIDRFESADFLKEDLKFGGSDKIRRENAFHSNDEAITVDDLWENWFQSEERGWTNKQVVEWLTNQVKLPQYANGFLSAEVTGLDLPKMAVQNSSFLSTKIGIKNYVHRQKLQLKALDLVXFGFQDTSSIAKDIALAGLLGLLVAVLVIFXKHKNRSKKXMEELSTVLNKLRDMETDXAGVXNRLEDENLNDSQQRRIETSIGENQLRELETTT

SEQ ID NO: 161617 - protein, 185 aa, Heterodera glycines
  unsure (1)..(185): unsure at all Xaa locations
MRAILFLAXVCLVMAVILETANSKAVKKDNKKGAVATPAKGKAAPKGAAKGGIKKDAKSKGKGKKDAKGKKDKKAKPAKGKASPKNDKKSPAAKANDKKSPTKPMAAVKAVPKAAENAQKGPSSAEVVAEENNLDTEAVDDLGAEESDFDQLAEDELLEDDAMGGEADGWEGLGEETXMDSQMAL

SEQ ID NO: 161618 - protein, 197 aa, Heterodera glycines
GTDEENLGILHKSEIDVSVLPGGYLTKVRIACCILRFLTDEQVRTMFNISIDQFYGNFVTMLNQRLYSLCRIDSSPKDLKEAERVDFVRTILSPQSIFRQTPEIARLLVCLIVDNDIDGLTTLGKAAQRLVQLRLSVPLLELLKYLRNIKGKDIRTIPNISAFFAKTFEALFDKIDAPATDRKELASLVFFLISCPV

SEQ ID NO: 161619 - protein, 261 aa, Heterodera glycines
  unsure (1)..(261): unsure at all Xaa locations
GTGVFPRHFVPAPFERYDHEITQHSLRLYADEEGHLAQRAYIARQLEFPELRLIEYDCGKLQMLARLLESLFSNKHRCLIFTQMSRMLDILQAFLSYHNYKYFRLDGSTHIDQRQAMMERFNSDSSVFCFILSTRSGGVGVNLTGADTVIFYDSDWNPTMDAQAQDRCHRIGQTRNVTIYRLISEKTIEENILTKSMQKRRLXGEMAIDQGEFTPDFFKNTGNLRDLFSNETAVAKIIAPVVDEPKTXKDVEAAMNRVEDH

SEQ ID NO: 161620 - protein, 43 aa, Heterodera glycines
PYPLAPIDCHFPLSESHPFALGRPFPKAHPFDAARGLPNCAFE

SEQ ID NO: 161621 - protein, 237 aa, Heterodera glycines
  unsure (1)..(237): unsure at all Xaa locations
MPHAYVLSLQLGSSVAEDIGRGYFANMNDEVAAVCQQLAEDARLANGYNAIGFSQGALFVRALAQRCPHPPIRNLISIGGPQQGIFGLPFCPGSFYVCSLIRRLLDNGAYTEFAQHNLVQAQYWHDPNLAEGYRRANIFLADVNCERSCDSTYRDNMGKLRNFVLVGFSNDHKLVPKETAWXFGFYADNDTQTIVPMEQTELYKQDRIGLKTLNESNRLHFLTFNGEHLQIPTDLFI

SEQ ID NO: 161622 - protein, 267 aa, Heterodera glycines
  unsure (1)..(267): unsure at all Xaa locations
VKIFSAEAKELQSYKNKIMEIWEISRXEGTTKGLMFGGFQXTGYLALTSMLYYGSVLIADGCLTYGDLSSFMLYSALCFGGITNFQLFYTELMRGLGASARIFELRDQKPSISSEGGLVINALNKEVRFESVAFSYLNRESIFSDITFRIPKASVTAIVGASGSGKSTIAHLLLRLYSPTAGRIMVDDIDLKQLDLSSWRRMIGTVSQEPILFSTSIRDNILYGVENSHLITDEELTEAAEQSNCLEFIRSFPNGXDTVLGEHGSSC

SEQ ID NO: 161623 - protein, 93 aa, Heterodera glycines
LVHPPEHQSHFLFSEWQSVNFQQHGSGSYHAAYSVANQQLRCWGHLLLPGPPFRQTMRSLSCIRSVRWSFRSTICRISIYALHDTSNSNQSTS

SEQ ID NO: 161624 - protein, 172 aa, Heterodera glycines
MTLSEELVESSADDKTKEKIPLPSSLVVSVPITPLKTSTSVVDMTLSEELVEISAYDMTKEKIPLPSTEDNYNVDDLSSNDETDPEDSPKKQIPKWAQKEYLAQQINGLQRIDVLEKVEKYFGRIRQPALIDFFKQSKKKYTKRRSSSAVWDSPMSDPTPGGRFQKFQKSSN

SEQ ID NO: 161625 - protein, 142 aa, Heterodera glycines
  unsure (1)..(142): unsure at all Xaa locations
VDLPYPARRLAWGKWLNCGQTCLAPDYVMVTNEMKPRLVEELKAVLVEYYGTNPETSKDYSRVINEAHFDRICALLKNSVGIEICKMGQPNREDLFIPPTILEVQTDDALMQSEIFGPILPFLIVRSFDEAIDIIXGGEKPL

SEQ ID NO: 161626 - protein, 172 aa, Heterodera glycines
QIDRCPLLFDLLLLLSDLGFHGLFFCLPLIKAQFANVLSQLECTPLKDLPISVAIRQRCRQLFALLISADFFPDLIDICVEMLPETTNHEMAVLMRDLWNFLKSLFSMSSSPTSLHSSDVRPMPPPSPNRMDALTSKEGRLLTSTILLIGQRHIASMGPLLAKLVDLLGGVE

SEQ ID NO: 161627 - protein, 123 aa, Heterodera glycines
ACGVRMCHIETYIFMDFETTGLFDDGHNNPLTNPNRSNETARERAQRLDNLIKSDGNRFPKITEMAYMSVPRVLFLEGTEQMSARHLSSMSQDGEEGIEPVQVVTNVHVRQLSPQLNDKERFK

SEQ ID NO: 161628 - protein, 140 aa, Heterodera glycines
TAAGREQRIRDLMLTNTKKLAGRDRLIRQQEIKIQRLERANTQKSDSLKRKMEEMQKLKKKERRKTMFETNNPRKPLTPINEQLTPESKHLERLNTTYIVDTPSEEQKKGRLLGELPEEKDSNYQIPPLLSGCCPKGPSV

SEQ ID NO: 161629 - protein, 47 aa, Heterodera glycines
  unsure (1)..(47): unsure at all Xaa locations
KFGFIVMDGNGSLFGTLQXKCREVLHKFSVELPKKHGRGGQSALRFA

SEQ ID NO: 161630 - protein, 68 aa, Heterodera glycines
  unsure (1)..(68): unsure at all Xaa locations
CREDKPIDPTHXLIDCLCXGQICETNRANALXGLPFKFDSXRFNGVRGWEIGCPNVRPEEPNSSGVIV

SEQ ID NO: 161631 - protein, 248 aa, Heterodera glycines
  unsure (1)..(248): unsure at all Xaa locations
MASLLDSNGKYRCNTYGLCFEPIDNEICLGSSNRILIGMVLAPADRDVTCLLFATARSFYQEQQHSVGSCPKIVTKCTVNLRPIEFNLSEEGRESMSSPIYNAHWTSTEPIWSLCFNSHHMKICVGMEKCAKILNVLSGQNFYVGSGGKNVISCIFSKDGNTLFLGRKNADVSMLDMRMTSNHKVGELAQSPSTGYMHLLQTRPHTLVTENXEGKIKLWDVRGRCQPLAELEIGHRNSSHKLPCFVDA

SEQ ID NO: 161632 - protein, 208 aa, Heterodera glycines
  unsure (1)..(208): unsure at all Xaa locations
RPSPPLKEQNRRMASQNGDLENQLEICQGLVNELRAEVDSLRGELSECKLPFRISNSELQNITVRHSRTGDAVERIGPRKANTKSLLKPRARLCSNTPKMAVPSEKRAKRGLTKDSEDDDNFRTAEFVPTTPRPQFLLPPLVLTPLSSRFPPLPRRSFSVEPTPTHIQKNAEQQLTXIRDGNGDMPCPFSQKRLNDNGEIQCPSSSTX

SEQ ID NO: 161633 - protein, 84 aa, Heterodera glycines; identical to SEQ ID NO: 160731

SEQ ID NO: 161634 - protein, 200 aa, Heterodera glycines
  unsure (1)..(200): unsure at all Xaa locations
SQKGGAENGRGQKGRXQSPVPRPXLTEAADNVNKAVDDLSXLNRQKHXKNAAEATAEKTPXRAGKSIERSGRKRRKRTAEDGCQQNFGGKSEKRRGIGKRSENENGNTFXGQQKGQRRVDFDNXRQKDDFGREGEADGGADSQNVGQHEEGAESEQQCRRRRLRQVVLRRRRAGGGHGGQSMINQSDRRIRHCCVMKCSQ

SEQ ID NO: 161635 - protein, 31 aa, Heterodera glycines
YSKHKTINTTLMHTTISNHQKHILLFKYFNC

SEQ ID NO: 161636 - protein, 102 aa, Heterodera glycines
  unsure (1)..(102): unsure at all Xaa locations
VKGSITQNLPKXNPFVIVRLLFTLVMFFGFAIQMYVVVEMLWPEFVKFLRNLCPNFGVYNENDHKNMVGIELLFRAALVTVSMLIGLAVPELENIIPLVGAT

SEQ ID NO: 161637 - protein, 182 aa, Heterodera glycines
  unsure (1)..(182): unsure at all Xaa locations
KRRRRRKKRRKQFQWLRKVFMATTRTLTRRRERGRRIIRREGKCRRLNAMERRQKAMGPIKRAKATMWTRGRASSHKTCVRVGSARHCSAVLRCRDRQNGSGTTGTPPRSLCLSKTMPPTRVKSKTTPGMVKSRATMPPNFESTSATQXADVLRSGNASPLARSTPQPMDQENEQSCSNRLF

SEQ ID NO: 161638 - protein, 96 aa, Heterodera glycines
RRAYLPGQRCCLPPGPPNFRPGGSDYIVNMWDPFNRKRLCQFRKFPSSVVSLSFSPDGGMLAIASTYMYEEERDPNPIPESSLTIRRMTELEVRPK

SEQ ID NO: 161639 - protein, 244 aa, Heterodera glycines
VRIGFGDADPLWDSENEKYKVLCRTFMFPGSSVIGYMRLLVSLVSSLFFAYQYMMAVTGRLSSDHWINQVTARFMSQAMMSICLQVIVVVLMVHGVKAEKKSLLLPFIAYAAIAVLAGSIKVMSDLVYLDTSVYKNNEAESRAAKVQFLTNLLRTVLQAWCLSVVWRCYGYLTEKKVARQIREQLNSTATAFNYPENLMGHPSMPQQPPPYAAVVTAPIAIGPSNDKPQTSATNTSATASHIQQ

SEQ ID NO: 161640 - protein, 245 aa, Heterodera glycines
  unsure (1)..(245): unsure at all Xaa locations
NILLKSVLFISLLSLFGDCMKNSDQIGVKRKSAGIRIEEPNDVKGKGKVVETSRKGKEKVGEKISVMNTAERIEKMDLAQDKAKMDIDTNGKPKQNEENAPPKYVFIWSGSNEKKNLEVDLRVTRHXQKKLSELFHAKSDQSVNAKHGKQEALPVPKQEAEKILKEVEEWYAHHKNDKHKNAPVFVFKCKDNVSLVINVHLDAVRLSKELSNMLEDTADEGYPKPIPSPVPNFKSDITLKLIKLC

SEQ ID NO: 161641 - protein, 92 aa, Heterodera glycines
MYNQFRFQLPNTWKNELCANETFQYVSHYTTRAGKRKQSENAKICKGCKNEERKIAFDPCGHFFLCKKCANTIKTCPECKVKVKERLEIFNV

SEQ ID NO: 161642 - protein, 223 aa, Heterodera glycines
  unsure (1)..(223): unsure at all Xaa locations
WHAKFDGILGMGFSEISVQKLPTVFDNMVTQQKVPEPVFAFWLNRDPTSEFGGEITIGGTDQRRFVAPITYTPVTHKAYWQFKMDSISGGNGKLACQNGCQAIADTGTSLLAGPKNDIEKIQKHIGAIPLFHGEYMISCERIPTLPDVTINIGGKAYTXEGQGLCAENDQHGQKHMPFRFYGHXFAGTCRRTLDSWRCVYWSLLHGVXCGPKSCXFCAGQRRK

SEQ ID NO: 161643 - protein, 185 aa, Heterodera glycines
KCAKCKCDNRLQATAYWSFDIRTQLLDNGAELGSQLEPNKIHQQSPSKYSISNKKLLKLCRVVYVSACPQEFSEKLILHMERFGELFDYDINATPQIFTYKEPLDAQRAVNEAVGSFELAKLKVEWAPVAKGVKDDKNIVPDGERKPSEQVAAKDLIALLEYDEEEEDDKKEGDEEQLSEKEGND

SEQ ID NO: 161644 - protein, 224 aa, Heterodera glycines
  unsure (1)..(224): unsure at all Xaa locations
MLIAYIPKRIHLNLNVVGAAFRQRMPFSAAVLDPHDQLKDSDKPMSEQMNPSFFKMVDYYFDKGAAAIEPKLVENFKASHGKSKEERVSSVKGILAAIKPVNKVLYVTFPLRRDDGSYEMIEAWRAMHSEHRTPTKGGIRFSMDVNEDEVKALSALMTAKCAVVDVPFGGAKGGVKIDPKKYSAYEIEEITRSFTIELAKKGFLGPGVXDVPAPDMGTGEREMA

SEQ ID NO: 161645 - protein, 235 aa, Heterodera glycines
  unsure (1)..(235): unsure at all Xaa locations
TSAVALSSAIPGNDENSSSPAVPSERSLELLKKYFGYSRFRPLQYEVIEAALSKRDQLVVMSTGYGKSVCYQLPSLIQNNLTLVVSPLISLMEDQVNALENVGVEAAYLGGNQSREAIFDSIKRGRLRILYIXXEAYQSTPDFIQNIHEYVGLLAVDEAHCISQWGHEFRPGYRQIADIRNVLTGVPVIALTATATDPVRNDIVQNLRLRNPKVTLSAFDRKNLFIEVQKRTQSL

SEQ ID NO: 161646 - protein, 95 aa, Heterodera glycines
  unsure (1)..(95): unsure at all Xaa locations
SGNISSAGIVTTITIIVARRLFYPSLATGGAEPIGGKSAXVGNALCLQPSLATXRSTLTPPAAGQFERCGXNRLKRMRAHLRELAEKMPVHLSNR

SEQ ID NO: 161647 - protein, 235 aa, Heterodera glycines
NGRASGGIEIGTRGDSCSISANSSASLISVPDFVRVEEIPEECAIKRVPSALCSFVDPFCDPKKPVKTTFSDISTAAFNIRDGILRTPTIKSDALSSMFGVDLFFKQEYLQVTGSFKERGARFALLRLTEEQRRIGVIAASAGNHALSLAYHGSKLGIPVTVVMPKFAPLMKISCCESYKAKVILHGLNIQESKIFAYELAKEKNLKYVNGFDNPDVIAGQGTIGLEILDQVGDV

SEQ ID NO: 161648 - protein, 101 aa, Heterodera glycines
  unsure (1)..(101): unsure at all Xaa locations
FLRNRQFCSRSQQRHSQQHRTKMARRRRKKEPRKQSYKLYVRRVLKEVHPGXGNLXMRALNIMNSFVIDALDRIATEATRMAHNDRRKTITLRDMEFSVRL

SEQ ID NO: 161649 - protein, 209 aa, Heterodera glycines
PEHGGGGGAGTSATNDGIGTGNGVPSDQRNIRRFVAELEQRLVESEAEIAALCSEKRELAKRVGHMANKLDTERVQNASAMESVRRDRQLLVEENERERALHAVMRDKFDELKRKFDTIAKTVLDKQSELEKMTKMNTELSQQLHEQAEALERHRAELETATKMVAERDTELKGSECELAKCREENTKLDELRQQMVHLLEEFGANLDK

SEQ ID NO: 161650 - protein, 96 aa, Heterodera glycines
  unsure (1)..(96): unsure at all Xaa locations
MLIAYIPKRIHLNLNVVGAAFRQRMPFSAAVLDPHDQLKDSDKPMSEQMNPSFFKMVDYYFDKGAAVIEPKLVENFKASHGKSKEERVSSVKGIXC

SEQ ID NO: 161651 - protein, 54 aa, Heterodera glycines
LCFRSFFYLHCPTDWKMITDMQLGIMANVLGVSIFILVIFYHYIVANQKKQSPQ

SEQ ID NO: 161652 - protein, 221 aa, Heterodera glycines
DSLENFRSQGSRTLLGDDFHWLNPLRGSVQFAAFGSNSLNSSSSSFDVTHWLHEMSRLGVRPSVKTFNAALSSLLQIKEKGANSFDYGTEEMAAAVTPSTEESSYDKEHLWKTASDLVHEMRSLGIEPTLATFSYTLKLAPTKMSLDALLNEILTRLEYKLSRSEPIERVGDDDAIFYRNAISMARILNNELQMDRLVKIYRSEHNKVFFQNYDNEQRFYA

SEQ ID NO: 161653 - protein, 107 aa, Heterodera glycines
KFLFFLHFCILIKAISGLHCWNSNMILLSEMPEKGSVTVRQCPSGHQCVTANCWLGVGNYIVQKCVPDQPGARNYCKDFNNICQMGFFGMPIHCSSCKGDLCNEARN

SEQ ID NO: 161654 - protein, 77 aa, Heterodera glycines
TIHNFPSPFDDSDGPKFHSLFRNSGDMTRVHNITNIFVGFRSLKHDEFWRCHPNGNALLFQSVQNLLKAQCPPRLCT

SEQ ID NO: 161655 - protein, 191 aa, Heterodera glycines
KEDPTVAVYCYSSFSDIRSIDSFVDKILIAVKAPFEPQPRSSIEVPDPCETGRYEMTVRNENGGPLQAYLCREPTQKNASELAPNNCKAETEETKAIDSLGTQSFCGPKIPSNELRSPSKQQKMLSPLKLLFANSQPHPDAVSSNSVGPGGVFFPPPGDSFLSLDPPFEENDPYCPLFMNDQNTSLNSLFG

SEQ ID NO: 161656 - protein, 261 aa, Heterodera glycines
  unsure (1)..(261): unsure at all Xaa locations
RTRRSFFFVPSLSCAECRLSDRVTVPNILFQKIVEITQKGPKWTPFIEMIVKGRENVFISVSVDELLFNGYQDPLISEICSNVLFKMMCKLANIPDRIGLFYGQNNTDDGQYAVDTGLNDPDFLDRVYSFKGIEGKLSDDHWYGERARMINGTDAELFGPNLMDAPKLQIFIGQLCRSFDLEVRQPALTADLPVFRYAQPDSALDIAVQRSQGFCNPNSPLFFNESVQXVGCAPSGLLDMSSCFPGSPXIFFSASHFRNAH

SEQ ID NO: 161657 - protein, 128 aa, Heterodera glycines
MTLQWTVVAFILYAEIATIIVLLLPWVRPTMWKKVFNSRVVHKLKQFSNVYAYAFIFVLILLFVDATREVRKYSHVDTTREMVGRVAEADAVVHMRLFRAQRNLYLSGFSLLMALIISRIVTLLARCA

SEQ ID NO: 161658 - protein, 197 aa, Heterodera glycines
  unsure (1)..(197): unsure at all Xaa locations
WDNGPFICEYVWNXTSFDRMFAALVKLESKESCVSQYIYHKLMGHDVDDILFKLIMPKKFSAPGLPELNHSQISAIKAALQRPLSLIQGPPGTGKTVTSATLVYHLVKLTNGQVLVCAPSNIAVDQLAEKIHRTGLKVLRFCAKGRETVDSSVAFLSLHNQLKALQSGDLFKLMKLKEEIGELSQADQNRFMALRRQ

SEQ ID NO: 161659 - protein, 117 aa, Heterodera glycines
QLADLAKKTLILFRDANESFSDQNAVSDWLRHSFDLPANSICELSSPSLVTNSQVFFIVFDEIGTAERILEMSKSEERAQKTFLTSATEFLQSNSPGKFTDAAFSDENAWRNLAAAS

SEQ ID NO: 161660 - protein, 149 aa, Heterodera glycines
IADKEVLNGFEDLYEAFVHFFTRGAPAERCMVNDAAFDRMVHTVEDKHLRAQHYIGGNAALMAQKIASSFPAATAYLVGPIGPRSHALLHPAIVRNNSTRIAEDELHLILEYKQGEILGEYVSPASSRFIVSHDQFSGSAMIIEMFFKA

SEQ ID NO: 161661 - protein, 45 aa, Heterodera glycines
MPTLSSFPSAICCFIRLSLALVASSFTSNELFWCVCCDGNLCCAD

SEQ ID NO: 161662 - protein, 200 aa, Heterodera glycines
  unsure (1)..(200): unsure at all Xaa locations
KRGRPWRAATPTITSTTARGRXENTTKNGGEEGVEKKILSKGVSGVVKWFNVMNGYGFICRDDTNDDIFVHNSAITANNPSKIQRSLGDGEKVMFDIVDGAKGPEAANVTGPDGVPVQGSKYAADLSQRRRFAGPRRNYFFRGNRNRRPRHSEEAAGGEVPVGEKKEGAXENNGKEAKKEEVAKDANGGRGGGQRPGRGV

SEQ ID NO: 161663 - protein, 241 aa, Heterodera glycines
EECEQECELRRGDDIRLQIAIEESKRELARSSSLSSPSGGIDPVEKQGTSKSHGALDDLLSLGLDDVFRSNIPNATAPGSSAQTQQQPPQLGVFNDPWSPRPSTTIPMVETAPPVSAHQTIIQNDPWAPAASSSDPSFVSFGSSSTTRTINPDGGHVLGPLMQASSTKNDPWASFETQSFAASEPTKQSSDDFFGNIGEPAQTTNQPTSQGQQRAGVKTPESFLGENSALVILISAWPSTI

SEQ ID NO: 161664 - protein, 170 aa, Heterodera glycines
CRVPVANCPPFSLFYPHRCPEPKMLYPAQANIVNRLLSRPSPSYRCTMDTLRRADRRLVFSRFRHWKSFSEESEALTCCAFSPTDNHAFLGTYAGDIFVFNIHTGTVETNYNAQHSAIRTIQPSKDRLMLTSSAYVKPYCILWKMDEKGISIHERLIDFNEEESVEFANL

SEQ ID NO: 161665 - protein, 243 aa, Heterodera glycines
LHRIVGYYQGIRPLTNDQAKKLTHLILAFSTPDSQGNLSPLFSVLKQALKAGKSANGALKVMIAIGGGGFDPAIFTSLASNSGTRKSFINNIVSYLKTNELDGCDIDWEFPTSSDKAIFVTFLRDLKKAMAPSGAVLSMASAASAFYLDPGYDLPGIESAVDFINVMCYDYYGSWTKTSTGPNSPLFKGGSADPSDTLNSNWTMNYHLMKVYNRAKLNMGVPFYGKSWTNVGAPLNGDGLWRQ

SEQ ID NO: 161666 - protein, 205 aa, Heterodera glycines
  unsure (1)..(205): unsure at all Xaa locations
QNGCHAXADTGTSLLAGPKNDIEKIQKYIGAIPLFHGEYMISCERIPTLPDVTINIGGKAYTXEGQGLCAENDQHGQKHMPFRFYGHXFAGTCRRTLDSWRCVYWSLLHGVXCGPKSCWFCAGQRRKXKFQXASSARLRKGRRTLLRSFQRSXTILISRWXGRFCNDGLKKIDFIYAIFSFIQFLIHDEAYEXTIFPSLIIVITM

SEQ ID NO: 161667 - protein, 92 aa, Heterodera glycines
DRIHVRMTRKTVQGTANRTESHLLLDNTEPIGGADILMASSVLAIVLQQFALFRAARLSLILHSLLHFAHLNCLVSMYGAAGIVLLFSTSKK

SEQ ID NO: 161668 - protein, 70 aa, Heterodera glycines
QASAVHCRADARTPFATRTRTSRPNVRFAVVRPGRLELDDELNYSFLQFDPPAARRGEPHVTRRTPDYFL

SEQ ID NO: 161669 - protein, 240 aa, Heterodera glycines
  unsure (1)..(240): unsure at all Xaa locations
TGVVTPLERFGDICNAYDVLFLVDTVASICGAPFHADALKVDCVYAATQKVLNCPPGLAPISFSEKALEKITKRKTRVPSFYFDALELGNYWGCFDEPRRYHHTAPISLVYALREGLSAVAQEGIGHMVNRHKINAKLLYDAFDQLGLELFVQKENNRLPCLTTVRVPEGVDWKAVQDKLMAQGFEIAGGLGPTAGKIWRIGTFGINSNPEDIESLKQALKGALYEQEEEGQSDHFKAXI

SEQ ID NO: 161670 - protein, 43 aa, Heterodera glycines
SELYSHTKPLSPKRALPLGKWRPNVSGFCAVFFTEVPKVVEWL

SEQ ID NO: 161671 - protein, 89 aa, Heterodera glycines
FFFFFFFFFLVNFLFYSKSSISSCIRTNSQRQKASILNSRSQDTARDESRLLHLRHSRILEQIVVRSIRALLIGVIWRISEIIAIPSVL

SEQ ID NO: 161672 - protein, 50 aa, Heterodera glycines
MSLLFDVGRVCPSDSSHPSECVRRPHAEKWEFLVRHFIRIAVGIRSLNSV

SEQ ID NO: 161673 - protein, 138 aa, Heterodera glycines
MPDIFKILLIVLLAVVSFRLSASTGDKKTANDGSGNNSSAGIGTKIKRIVTAGLLFTSLATGGAEAIGRSNAQGGNAAGLVPSHVTNRSMAPPPPPVQFEMGANRLEKMRAHLRELAEKMPVNESKRLSPSGPDPHHH

SEQ ID NO: 161674 - protein, 175 aa, Heterodera glycines
SNDGDVDMRADSYDSEDSDANEQISARQLKLMRELEQKCVEFLNESDVTELNACEKFNDKFVAFVLANRPFENFRDLKSKLTVAPGRKAGAGAFVRLLDNYLEWLENRATTNQSPPPVAIPPHGTIKLPCHGYPLVLVHELNGFDGDLLLSSSPSYSVKSAAFDDVGMDNKAKVT

SEQ ID NO: 161675 - protein, 63 aa, Heterodera glycines
FLRIIAAAVLCPCHHQIKSTKAEPSEVCTNRLPNETGHHKSTKSSLSSAVKVVQKETHGPNRR

SEQ ID NO: 161676 - protein, 82 aa, Heterodera glycines
GAKLCRAGRNTMAESNQLHAACMDTSPPLNYLNVTSHALIEFVHDFNTRYGTRLAYTFDAGPNCCLLFELETFDLLRHALPN

SEQ ID NO: 161677 - protein, 75 aa, Heterodera glycines
VIDVPPPPCVVVVVVSLSLLPMPKMPKVPSTIRRKVKRAQKVLKFASWVILILCSLYGGLFLSFCNDRRRYFKYK

SEQ ID NO: 161678 - protein, 150 aa, Heterodera glycines
KFHCYLNIPTVATGNFKKKQRYNYVKHQSQVKANLNGLEKDVKEKGQFVDDAKESFHQKNVNDDTNENVKQRKRPEKHHGNEHEAEEQRETEHTAKLGMVFDIKCCTAAFEVSVRIVGIDSECRAKLGHFNGKSGNEWTRLFSINSNFQN

SEQ ID NO: 161679 - protein, 167 aa, Heterodera glycines
MAGKFIGGRMPFRQSLWAPSFLTVSPLWPFPLRPNSAFSHARVFNSEFPSSHSPKLRCVLSANNKTNSRARRYHHPRPHLVIFDKDGTLICFHSLWVPWVRSFAQKVDEAGIDGIAPNVFHALGFCPVLKKVKRGLLAEGTMRQILDRVVHLLVQNGLQRRESLNVD

SEQ ID NO: 161680 - protein, 50 aa, Heterodera glycines
MSAAVSSSRPMEDWKSELAMPDKDLRYKTSDVTATKGVEFEEFGLTRDPL

SEQ ID NO: 161681 - protein, 83 aa, Heterodera glycines
  unsure (1)..(83): unsure at all Xaa locations
FLAPPRKEKFGGAPKKIFGISLSEGRSMAKSERVPLFFVPFXSELRIIYSFMHFIAWLIGWAKIFFVNYWFWLLHFFRKKTRI

SEQ ID NO: 161682 - protein, 77 aa, Heterodera glycines
  unsure (1)..(77): unsure at all Xaa locations
GLLERVEIEPKSSSDTMXFKDNTAGYFXNLATLDKGGQYKTVKHRHTVQVHPNSCLFEDRLRWVIYYELVFTSKEFM

SEQ ID NO: 161683 - protein, 30 aa, Heterodera glycines
GHLICVRFTGDILSFWKIGGGFQRKERGAS

SEQ ID NO: 161684 - protein, 88 aa, Heterodera glycines
WGQLANEIWGGTRNWRGTQMMIKMGLGGVHFFGFFSDPSVCFLHHRFSSFHPILLLLLLLQLIILRLRLLVEHYFALFFLRLLFFFLP

SEQ ID NO: 161685 - protein, 131 aa, Heterodera glycines
LQCAGDSAGLWQSYVTRSAFSSQMLNNSQNIEELRHNTEGFAKALGFSSTAHHRISSKMAGSPQTVRVFVDELSRRFRPVFFSRLEGAWKTYAEEQEERVISDLEAFDLFYICRKEAEHNQNVDSLELMEH

SEQ ID NO: 161686 - protein, 86 aa, Heterodera glycines
MRILPPYFSDHFMLFIHQPQNTTTNRQHIFHIWITKKKPDDDFDQPHQFFNCFFLQFLNLFKEFACFFAPPSSPPPPLIYLVYMLL

SEQ ID NO: 161687 - protein, 256 aa, Heterodera glycines
  unsure (1)..(256): unsure at all Xaa locations
XKMETTKAQLLGIFWDFFSEAAKANLLWKRLRFADQQIVELVDQFCRIDKQYLLSHSQITLALRNVDNAMAFCQNWLVACAKAANAMQTTIVMDAFSHWIYSGRPPLNGAIEIVHFWIELFSKRTATNDIRRMCRWPEIDKNLFRRIGILFVEANEKYVLKLKILEKIKGVRQLLDEICANVNHLSLTCCAHNSLQIAMDQWKTTVCPNGQFRYLLQPKNKKNKQSAEMVLYQNRQLPPAHANQQLSTNKCAICLS

SEQ ID NO: 161688 - protein, 244 aa, Heterodera glycines
TAPPVLDLTALVTVTTFLVPSHAHRDRVVTISSPENSNFIQCAPSYAFRKTGVLEIANFEPRWEQMLYTLFLAEGWIVNAPDHEGPESAFSAGRFGGHMVLDSMRAANNFKPLQLSKRPMHIGHGYSGGSTPNGWAASLHETYANELNVVGWSLGGSMTDPLYTLNSLDGKPTSSLVVAGAIGLMDAYRDEVGNLLDDEVWTEEGKIAEKVMRNSCVYEAVIRYFGATFQSERYIKGGRNLSSW

SEQ ID NO: 161689 - protein, 200 aa, Heterodera glycines
QEIVTLRMNVQPPPTATHSQPTILPMPIQNWSHELGIEFGDVLIADLLRRMCSPDFSSPLAPSARWHDIPFFEQFRSDLQFQWTLLRSVLVGGNRGKLNAKLLSILFWTVSDREEWQKRTVARLIYAAKDDKELANLVSLVIAVLPQLCQHRQQSSGELGLMSAAILLALADARRFGTEWDQFVMATDASGSTDPKNGSK

SEQ ID NO: 161690 - protein, 59 aa, Heterodera glycines
GVENFFYNKMMNKIYTTIHFLLLLTVIANKSTNCATNVQGTQTVKTADATYDEAGKIFA

SEQ ID NO: 161691 - protein, 143 aa, Heterodera glycines
PHPLQGIIHCDIAARNCLYSNGVVKISDFGMAHRGPVKKMEPNARVPVKWLSPEALAERCFTAKSDTWAYGVMCWEIFTNGEVPYSQMAGSDVAVSLINGQRLDFPRDAPSKFVEFILQHTWDAETSGRYSMAAVHDWLKRHT

SEQ ID NO: 161692 - protein, 79 aa, Heterodera glycines
AFPLFVVFVGEFAVFVFLLTLYRPSSEEIPDTATEVLVDEMPESFSMCRTDLSVLSIFFSLSVKAFPELSSISTEFVAF

SEQ ID NO: 161693 - protein, 105 aa, Heterodera glycines
MKMVEKENDIAAAVPNNAANNGHVEAVDPSASKSAKEVPNNTEKHSAEDLMGLARLFLKEYYTKLSDLPSEAGIFYGDDSHFVHADVEETGRENIQRAIGNMGLR

SEQ ID NO: 161694 - protein, 127 aa, Heterodera glycines
PLLLLASPIHLLCAAFLLPDSASSRSDQIAAAALISRCVSTPTKGRLAGESLHKAERVYRIYHNMEPVYLLPTYTLGLRPIITNRNTLRSLPSALLPNSLKLTWTPGLTTFGCQTQRAIPLLTQKCY

SEQ ID NO: 161695 - protein, 78 aa, Heterodera glycines
MRAVLFLAMVCLVMAVILETANSKAAKKENKKGAVATSAKGKAAPKGAAKGGIKKDAKSKGKGKKDAKGKKKKKKKKK

SEQ ID NO: 161696 - protein, 182 aa, Heterodera glycines
MNRRWLCNDVWMDILPFFDRPQLGLKLAMLSPRFDALVGIHFDGKTELTLWRPIAIRNSAAAVPELHVFFDGANNSVPFPLPDVHSPPMPNNIRFKDLRINCIDHSVIAFLRANQLIFQKGTNLRLSVPFGPFNIDDVQPILDDFARQIWPIFASTIRHFWFPDCRILDTLASSSFADNSHR

SEQ ID NO: 161697 - protein, 43 aa, Heterodera glycines
DSNLLVGMNGTTEDKTAPGANANGAFLCCKATQGTATLFIVGV

SEQ ID NO: 161698 - protein, 81 aa, Heterodera glycines
RMLCMQQHCFIRYFNGVPSLRSASAVAPPTGVDAVSVAPVVFVSARRVPMTRERQIRPPHVPFCRSCQSQAANPYSSSCPS

SEQ ID NO: 161699 - protein, 260 aa, Heterodera glycines
EGKVCEPINQVEALTAEKRRMEKTLQTTSREREELAQENKKLAAKLMNRKAQDRIIGERERGLEEELRQERLKSESANARIRELEQRIECIQDMNRDIAVEISNANSPLLITISSLEEKLLGLERENDILTRSTRQMSAELGAMKRRHEAEMGTIERSLEEEKQQNAQKTEELAKAFSERANIQTRIEKLEDELLQSKREHSERVNRMEKRMEQLETDIQAKRNELTESQRKNCEFQQKIIASTVERRNHANSLLIVNPL

SEQ ID NO: 161700 - protein, 55 aa, Heterodera glycines
AVLTFGAFDLETFGDLGLEAFGNFGLEAFIAFGLAVFSDFDFEAFVGVRDFFGVV

SEQ ID NO: 161701 - protein, 67 aa, Heterodera glycines
WPYSVQLQQKFLSCDQWLAVFNVPTEQKFFKNAGTELRFLLEHKLGHQLEQFLLIQSGQNGISSERR

SEQ ID NO: 161702 - protein, 55 aa, Heterodera glycines
MNILLKSVLFISLLSLFGDCMKNSDQIGVKRKSAGIRIEEPNDVKGKGKVVETSI

SEQ ID NO: 161703 - protein, 32 aa, Heterodera glycines
TGQTKQETQPLLEAHDHSRENGQQAECLTITS

SEQ ID NO: 161704 - protein, 147 aa, Heterodera glycines
MAEFLALFDRSIQETTTDQLSEPAREKVRCLFNLRENKWGVVAEPNVGDGPLTTASTSVGIIGPDDVPLTEDECAFMEENLDNFVDNSPGESQCLNAFDEDNVEDDFEKFLQATAIRAAEKALEKVSIDEDDDASSIVSSHKFSTSK

SEQ ID NO: 161705 - protein, 51 aa, Heterodera glycines
WKMYNISQLLFNKYGVGFWHPGAGIIHQVILEHYAFPGLLLIGTDSHTPKR

SEQ ID NO: 161706 - protein, 94 aa, Heterodera glycines
  unsure (1)..(94): unsure at all Xaa locations
QPVHKILTLRTAANPSLKTNKCAIVHRSVDAALNWLNYDEHNPFVLCSRSFVPLYWGKPXDRVPSAAPTFAGSVCGVCEVAEIGREASSDLMIS

SEQ ID NO: 161707 - protein, 89 aa, Heterodera glycines
  unsure (1)..(89): unsure at all Xaa locations
MSSSPSVSVLAIVAIVCLMCQCCFSAPHPCCPGSQKVVSLMSNYVGTFANSISKSSLCSDAQNVADALKGQLIGCSKGGDRTLLAXIEA

SEQ ID NO: 161708 - protein, 197 aa, Heterodera glycines
ILKKFPSLTDAFKKKRGNILNFEEEEFDEIISNGTSKRDNSPYTDHDYAGTRQLATAKGATGKHQRQKGGGGTAKEPKKKTALVNGTDSVVRSSARPHRPTKRFVEETNESFIRGTSKVRRTSPRKHGKKSTAEGGSEGEESEDDGKEYSVEKVFKKRVKGGKMEYFVKWAGYDDGWNTWEPRKSLKHLEVFKQYEK

SEQ ID NO: 161709 - protein, 202 aa, Heterodera glycines
  unsure (1)..(202): unsure at all Xaa locations
MRKFAYFKLCQAVLTSVFLWQILSTHQFCGEFDEPTAFFNSAVSSSHCEQFTLIGMDSTTGEYGAMPDKQKWHMQLMASSGSGQPIDEQQQNHMDEFSSKLPTVGRHCIPIAFSLVKPWVRDNKSHLQKVADLFAIQLLCGLLSLFVIAMHVLDQPRSWGYESIDYERTTFCAVLWCCPALVSSVLLXHWTSYWHCTNFRAD

SEQ ID NO: 161710 - protein, 90 aa, Heterodera glycines
MAFLSRLSILPNSPISLLAVSLAVLAFVALASANPPTARETAPNAQQNNANSVATGEIAKNIAEKMERMNEFINYFRAKKFIDAHNLAFE

SEQ ID NO: 161711 - protein, 141 aa, Heterodera glycines
MTIYNLYFFNRHGVCLAYKEWCREKKSGISPDEELKLVNGMLLSLRSFSHKLATRADQVPMISCFRTSSYKMNYMETATGLKMILNTDPDAVSIPELLQSIFCVFVETVLKNPFVDTSKRIDSELFNKRVDELVRAHFCFT

SEQ ID NO: 161712 - protein, 177 aa, Heterodera glycines
PIPVGICANVAFHPHNFVGDYFYQQSRKESVDVGQLAERTTWILRMLETNRVVHARPKYIIVLRDGLSEAQFSMAIDEEMGALKMGCMDYDESYKPKFMFVVGAKRHFKKFFMVHDGTVVNLTPGSVINEKMVRPDIPEFFMQSHYPKKGTGKPVEYSVLVDEIGMTQDELHGFLNA

SEQ ID NO: 161713 - protein, 204 aa, Heterodera glycines
  unsure (1)..(204): unsure at all Xaa locations
TKGHALLSHYGGGHTAKAEKELLKIYPECHWIDADPSDEINADMTESIGGTFVDGPIGAEDGXKQPVISWGATITELKLQKQIGIIDFLNNHTNWHHHPVDLLLMDIEGAEFPIVELFAYHFERFTGSICQINMEVHDPNTLIANYTHQQFFQSFDTLVRSGQFALMNTDMYTGRCTTAYVSQNVLCECGGRKVYKEIPVLITN

SEQ ID NO: 161714 - protein, 166 aa, Heterodera glycines
RVRYASLCFCAIHPFSLSLFVELRNSTEASEIPSFEIWIMVPIVITAGHWPIAIIRIGWQKLETVEAAIVPIGVQQITAIGRPIRTEQWVKVVIGDDVAQVAGHRPVIGLVFGPVSRGRIDLRVSLCDVRRGMDPRHLRIRAVGPTFGHICGRLTAAQVTSANAAD

SEQ ID NO: 161715 - protein, 57 aa, Heterodera glycines; identical to SEQ ID NO: 160188

SEQ ID NO: 161716 - protein, 46 aa, Heterodera glycines
  unsure (1)..(46): unsure at all Xaa locations
YAALEXAPPQNHGVPSRMYGQTEWRPNPNGCQRISQSDGGGAFAGE

SEQ ID NO: 161717 - protein, 196 aa, Heterodera glycines
  unsure (1)..(196): unsure at all Xaa locations
VAKSAAEMVLADDNFXTIVAAVEEGRAIYNNMKQFIRYLISSNIGEVVSIFLVAALGIPEALIPVQLLWVNLVTDGLPVTALGFNPPDLDIMDRLPRSASESLISKWLFFRYMAIGTYVGVATVAASMWWFLIYEDGPQVSYYQLTHWMRCEIEPENFEDLDCAVFVXNHPNTMALSVLVTIEMLNAINSLSGESV

SEQ ID NO: 161718 - protein, 103 aa, Heterodera glycines
SSPLYISCQAVSEDVLVSKLSGVARLDQLMEELILEDNDPKEPEPPLAASSSKNADSVGTYDERSHAEPPSAETDLSIIAPNIGRFLVGSLPFAMGSKLSHCC

SEQ ID NO: 161719 - protein, 191 aa, Heterodera glycines
  unsure (1)..(191): unsure at all Xaa locations
MGQINLCDDVWLDTLAWINRGEVGMKFALVNARFNTLVDRHFEQRKWCFGEFHICERMTEESGAEIMTSIDGSDFSTLPLPTTPLPDSVVGFQSISIWYINEEVINFLCTIRRLLAEDIALEFSTYFTEYRSWKVMARHIWPLLRDGISTLFLKKCDXGHAPXNTCRPPCCXDCAGLHRIHTQMLPECPSA

SEQ ID NO: 161720 - protein, 143 aa, Heterodera glycines
FILSSHWQSLGYAPKYLCFMFDVSIDLVWFAVGEAIISLHPLTNALISSVPSSALSRGVETNAAVVRPPNSADALFQLPAEYDNSQPNRLLQYRTNDHRRLGYFWRSGQSRRHSARSIVTTKRYALPQILTKVPSYVSHHFIN

SEQ ID NO: 161721 - protein, 242 aa, Heterodera glycines
MPSEMRFISADCWLLVFDFLAPSQLGLGIALISRRFDFYVDEHFKTRKWMLNKQLLITWDIEENGTKKMQIIDADRKETLPIPQKPLPNKVIGFSGRIQIIYIDQNVLTFLGHFHRFFATSAMDLDIVIENGRILEFVLLNIWPMFRDSIRRLFLNAIAFRCLRQLAPSMLTDCPSLCAVVFNDGIVSEFPIDDSAMASDVQVLAKWLFTPHPDGVPKWLKCSVNSSVEQWSSTIEQFKSAF

SEQ ID NO: 161722 - protein, 230 aa, Heterodera glycines
DLLRNECIYCEKTFADRNVLMEHMRKKNHREVNPKNNYYDKFYIINYLELGKRWLDVLAEDFEDTMPTFVDSDDEEEDSWHEWQEDNADEGDLFAVCLFCPHAREELEETIKHMNETHKFDLIGYIHDNSMDTYDRMKFVNFIRKRTFNTRTKDQQTMESKCVEIPDKEQWDNEENLVPLFGNDHLLWMLESWHLEHEMEIGKKATECDEPIEKAVTESVVDSPKINMGT

SEQ ID NO: 161723 - protein, 170 aa, Heterodera glycines
EKHLTSMEPIIPREQAQCLQNVFKHFAHFEINSATKDWTQEELRLYKRLFLGLRLCTLTFPPQLLRNLQILFKCIRQFCFNAKLMRENCWSANLRISNEENSLSICEINDQRIERVLRELFVLFFPQKNLECPKSFSLFKLLVEHVTPCLIQTPKWLADEVQKEMKDLLI

SEQ ID NO: 161724 - protein, 128 aa, Heterodera glycines
FVSTRSSVVGALSVYNCSSQFGALIGDTFTIIQPNLIRFRWKDWGWDDDYRKMKECIKSTDGRGAGVDKPSVVVAVSGDGYDAEAKSAADVANSSAENHHNDDHYAEHCLLMIRALNPSRQLLKNGTP

SEQ ID NO: 161725 - protein, 84 aa, Heterodera glycines
  unsure (1)..(84): unsure at all Xaa locations
RSAMSNAAANXGNGNGPQKCLVDEENVGPQLSSDSAAEHPPSYRRAAPPRSPSRNFQKRLSSTRPTPAASPTRKKSLSAISASG

SEQ ID NO: 161726 - protein, 199 aa, Heterodera glycines
AEMPSPTTTTGQSPDTSSVSAVAAIVARAIVVAVASVAGAIVVAVSVAPESPPSVSSNRCFNELRLYTTRPSAAAADSPGTPNSLGCCRPHANTTCLQRSVKVRCSAVFGTVSVPCSSQWHVPTKEGWQIFFPLLLCDEKMTFISQKTMNECEKNGRQLNDWGRERDRRESEKERKKGKGKDERTAEECTIKGVNYMCN

SEQ ID NO: 161727 - protein, 141 aa, Heterodera glycines
QTSFSKSYYQVQKNMLIIVRNGTGRLFALGQLYLVVGMMAFSVCWCSTVSPFPLDDRRLNEPRLGGGRLSVVEESPRRGTHTPPMQQQTPNEDDDHQKEYHSNGGNCFAFHSIVHFAESENMRVERMQTAITVKVLWTPTT

SEQ ID NO: 161728 - protein, 179 aa, Heterodera glycines; identical to SEQ ID NO: 160140

SEQ ID NO: 161729 - protein, 214 aa, Heterodera glycines
MSSENEIFICSDCWLLVFDFLAPSQLGLGIALISRRFDFYVDEHFKTRKWKLNKPFLIQWDTQENGTKQMQIVNSDDGSPLPIPQNLLPNKVIGFKYIEIIYIDQNVIAFLRRFHRFFAVCSTDLFIITENDRILDFVLLNIWPMFRHSMHLMIFNTIVFRRLRQLAPSLLSDCPSIRIVSFLDAIFPAFPPDESANASDGQAVTKWLLTPRPD

SEQ ID NO: 161730 - protein, 59 aa, Heterodera glycines
FNQPLGHVSRYHYTESSHMIVCGRARTRLFGSATRGLSVSVPAASKAVIVALSSRVSVA

SEQ ID NO: 161731 - protein, 201 aa, Heterodera glycines
MVVSQSKERIEPHGFKERAKVETLSKETIKTETSPKKDLFYIPKRKPLQGAPSISPASTATSTPKTISPPIVRPPSVESTLQHSSSCSPEDSFGSMTIPTKPTRDWSREFTMILNQDEAKRYHNIFKNEYAEYRRCYDDLTHVAQDFLALKSTMDKANDAIECQMVVKRIREKFTSLQNDQQFMLKRQRHTDLHAKLNAIK

SEQ ID NO: 161732 - protein, 67 aa, Heterodera glycines
  unsure (1)..(67): unsure at all Xaa locations
IPSYVKACKKYDPNWEPKFVYCIVDKXITTNVSSLRGQQQVENTAPGAVIDSKVVRVDIHEFWMQSH

SEQ ID NO: 161733 - protein, 64 aa, Heterodera glycines
IMYNWGVRAHDDAFDGAMQMVIVMFKVGSDRNSSRELATLSFPLIKLSGFLREFSSDGLAFQIQ

SEQ ID NO: 161734 - protein, 105 aa, Heterodera glycines
MAFLSRLSILPNSPISLLAVSLAVLAFVALASANPPTARETAPNAQQNNANSVATGEIAKNIAEKMERMNEFIKARKFIDAHNLAFENGEVSFKVAPNHLMHYTP

SEQ ID NO: 161735 - protein, 104 aa, Heterodera glycines
FFFFFFFGINAIYLIISGICKAHQIKKVQNRKQIKTPKIIVINPSSKHLLFMSRHWLSFVPPCQSLRCWSSPSFPRVSVRTGRTPRPAVASSPRQCHLMRATCI

SEQ ID NO: 161736 - protein, 74 aa, Heterodera glycines
  unsure (1)..(74): unsure at all Xaa locations
EAIPFADNTVRVRYFRFEFPLMRGXHFVGTGDLFTDMLMAWLEESRXDLCHSVKCTISSMQSVIRRTFDFAFAI

SEQ ID NO: 161737 - protein, 180 aa, Heterodera glycines
NFKEWHFSLAKRLEQAAKLEPTRVTLLRSSVGLAHTKEKHRVLVLFDGQSKNIFAMRRPKWEMIAIRLFRPLLRSIGGRGSAAAQAHLYSPLLCSDEPVFDLLFELKSLFSEGILFAVLRFSCHFQCLFGPPISQQSASSADEHSLPWPRTICPYRKINFCLFSPGGILALFHFSAKAFR

SEQ ID NO: 161738 - protein, 188 aa, Heterodera glycines
  unsure (1)..(188): unsure at all Xaa locations
CRLLTAAFLSSGLALPAPYDAESVVSSELNVPLLSADANVEAAITNESDAAAEIQAPSIPVPIEHQTAADITHPTETGNESSIASSSSTPKSEQTPKKVMNMKSALEGAVANVYGGLSLDKQTKTIAEAASKAKQTPAKLPADYDVNRVAERAAPRVYGWLPEDKQPKEIYDAAENAKNTPKXPPGDY

SEQ ID NO: 161739 - protein, 99 aa, Heterodera glycines
HRVGRTGRAGNKGWAYTFILPVGQEKIAGEVCRAFETADATPPEDLKKLWDDYKARMAAEGVEVYSGGGGYSGSGYRYHDMEDESELNKRKMTKLVYGL

SEQ ID NO: 161740 - protein, 193 aa, Heterodera glycines
MRRHFSCTSRLLLATTTDNKSDAASAKQQQFAKIELKPKTGSDGAVAEPERTYLEEMLIERDAEPKTAGQKVKRAVETTFYISFGLISCAVLGVMTYLVFKEFFAFNTPQGVYRDAVKRVKADERCREMFGKRIMTFGEESGRGRRRHILHNKYVKDGQERLSVMFHVKGDAGIGKTYAEIYKGEDGKWDYRF

SEQ ID NO: 161741 - protein, 178 aa, Heterodera glycines
VVLKRYTFCHLSTNSSSSTSSVNKFNNKTFKMSAESPTTSQRRARSRKTKKRAVSAGETKPLRRSARIAAQKAAKEKAAKQKARDGSTASTKSAGRGRPSRSPKKSGPKSRRSPAGRGGGRSQTPRKKKQPLKKAPGPSSRTPGRRAKKPSTKKSPAPRRAKTSTKKRGRPAKKAEQA

SEQ ID NO: 161742 - protein, 94 aa, Heterodera glycines
RKNCRLLHFVQKKGSESLDNEHMQNDDRENDKLPAQRQWETDTTKRKSWRARLLRTLSVGSPSVGRVMKDKEKQRGEKPTSHFANLDREWEVVT

SEQ ID NO: 161743 - protein, 94 aa, Heterodera glycines
QLFVHVHRFHSIRVQDNLAWKAEQLLDKRYVISHQSGAGDETDLNVQGGLHSKFPFLASSLRVCIPFKEQFLSICPFRIPLSTVALRFWFQIVF

SEQ ID NO: 161744 - protein, 131 aa, Heterodera glycines
  unsure (1)..(131): unsure at all Xaa locations
YXVITIIDTYTHHSGEIPSTSHNRHMYGASAPSSIKYHMPSVRNICWSFRNVVIDIRTTSTLLHHSCLFLIRRGQYRHIYRIHTGCGPHHVYSGRPHKTCPTVLATVHTGITAPTDTAAFMFGRLSTLFTF

SEQ ID NO: 161745 - protein, 167 aa, Heterodera glycines
MSSSSVIFTCHLCKRRNPITFESIDHLEAHFAQQHFQCLPYVCEQCPQFASGLYPTEGAIIEHMKLVHGSESEFEFKIIIREDTEEKRAKVRAALEHCVRNSGDVATSSSAATTTSNNDSTAIELPRTQQQVQTTHQPRVVQVVPAPTVVVRTEVVQQTAEKHSGAN

SEQ ID NO: 161746 - protein, 66 aa, Heterodera glycines
FILRVLRPTHHLNYATKFLYLNVVNAVSTGRIVVKIVWFHIATPRFCTPLVYTCCCSEIESPARGR

SEQ ID NO: 161747 - protein, 106 aa, Heterodera glycines
MPNIFKILLIVLLAVVSFRLSASTGDKKTANDGSGNNSSAGIGTKIKRIVTAGLLFTSLATGGAEAIGRITAHGGNAAGLVPSHVTNRSMAPPPPPVQFEVGANRL

SEQ ID NO: 161748 - protein, 156 aa, Heterodera glycines
LRTYRLLDVSGLHSPGFLASCSLVESIAIRKRPTADTRYGLFLSWTANWYAVWASTLCSFRTANGSWAHTFSALCNVSCTDKLRHSWSAVSTSHLPVQIHKGERLVFSRRAFSFVSQPSSDGWARLTSNVRRSLAFHNFCFAVSVSHCPRAGNVSF

SEQ ID NO: 161749 - protein, 180 aa, Heterodera glycines
  unsure (1)..(180): unsure at all Xaa locations
TTENWQETPAFQKTSEMMSGTAESVASKVNDFRNLSLFXSLEPKLGAAVTNAKEAASTSIDHMAGIRQGQRDRPRLRRAKTRIAMPKATAKANRHFLERAAYGGKSVSTGHDTVPARLFMPLRQLTIRIWMMEEQLEVGLTTVGTHCHSRYCWETQRVPSTTNVKPFIARHSFRLTFLLM

SEQ ID NO: 161750 - protein, 102 aa, Heterodera glycines
SRLRTLPRLAPFLTNSPCALSTSAVRKDIDSAAKYVGAGAATVGVAGSGAGIGNVFGSLVIGYARNPSLKQQLFQYAILGFALSEAMGLFCLTMGFLILFAF

SEQ ID NO: 161751 - protein, 51 aa, Heterodera glycines
QCSASINHCYNVAQKPICGPPSNRWVPPPVSLARTTCKSSSSSMRIIRPQL

SEQ ID NO: 161752 - protein, 88 aa, Heterodera glycines
LFRWCFLPQYFHYWLCCPFCPVIWHFLFPFVPPIRHFPLPFLPPFGTFFLLLLGILFFHLSPVFLSLLFLSIFFLHLPSSFLPHFPLH

SEQ ID NO: 161753 - protein, 67 aa, Heterodera glycines
SKMNRIHSLYEKSMTTAPREELDKYSIYFFRKRIWNVQDHFLCLNFWWNMQHPCLIQTPIWKADQAQ

SEQ ID NO: 161754 - protein, 163 aa, Heterodera glycines
EPLLPFAPLFPDNGPLGGRHFRQTTVGGMAPIGRTGPAGVIGAMGDCPVAHTGKDSKFGCCCCWFVCCRFSRALPRIDESSEWFSSCAVPPPFGFAVVVDVPPPPCVVVVVVSLSLLPMPKMPKVPSTIRRKVKRAQKVLKFASWVILILCSLYGGLFLSFCE

SEQ ID NO: 161755 - protein, 33 aa, Heterodera glycines
KILLIVLVAVVSYRLSASTGDQKTALDGSGNNS

SEQ ID NO: 161756 - protein, 214 aa, Heterodera glycines
NLRNFLGLPSFDESLFPPKSIALLKVLDSEKNRLEVKREEIVGSQARLTGKYKALCDRVGTTARQIEGVHDRIMSEDDLDKLKGEVDALHTFVNKRLEKALQLQAESKRIFETIRPSINSFNEDYLHFLRVDLDSQSTVLSSDFLKKMETLNERLKDHHDLWAKQVVFRYDELLVKLDELSAKCFQPSTEFPAKPNLKNLSEKELLKLEEEVRI

SEQ ID NO: 161757 - protein, 190 aa, Heterodera glycines
MPQRISTTSIPTSTASGQQTVHLQLVPQQGNSPIPGQQQQQQQQQHIIISAQPVQTTNTTTESADGNPIAAFMEYFVEQQQQPTCSTNTLPNVQTIQQYGSPVLDSKFTLKNKLLSGMDKSSEKAEREAVKRARQAEAARQRYHKLTPEQKKELNLKRTEAQKRKKQREKEVAELESILRASNDIVDDPE

SEQ ID NO: 161758 - protein, 166 aa, Heterodera glycines
MECQFDGTEAGKCAFCVKLPCKFGAVNCAEEVSISCVNPQELEKCCNARDNECCVCVLCEKNKVMKVLVECCGKRTETSAEAGKALCICVPKIGGGKCGGQVQVKQCDAKLVDECCAANTESGDCCCVCLSCNDQKCVVTVRCPAGEAKSTGPTCTASKCESVKCC

SEQ ID NO: 161759 - protein, 214 aa, Heterodera glycines
  unsure (1)..(214): unsure at all Xaa locations
NWGTAIALIVGKTTQDAXSHFDDSAVKMWVFEEVVEGPKLSEIINXKHQNVKYLPGKKLPTNVIVATDVAEASKNADVLIFIIPHQFLHKVCEQLKGNIKKSAIAISLIXKGLATFHEKDIGLRLISNEIATSLGIDTSVLMGANLANEVADDHFCEATTGTKNPQHGNELKKLFHTDNFRINVVEDAATVDLCGALXNIVACRAGFSFGLGYG

SEQ ID NO: 161760 - protein, 178 aa, Heterodera glycines
  unsure (1)..(178): unsure at all Xaa locations
MKGFVSKDICLYGXNVCVQKQEFTEATSEPGLTFVAAKFDGILGMGFSEISVQKLPTVFDNMVTQQKVPEPVFAFWLNRDPTSEFGGEITIGGTDQRRFVAPITYTPVTHKAYWQFKMDSISGGNGKLACHNGCQAIADTGTSLLAGPKNDIEKIHKHIGAIPLFHGEYMISCERFPT

SEQ ID NO: 161761 - protein, 116 aa, Heterodera glycines
GRIPADEHFPFHWQGDYTHVISCVIACVSPFTPYGLAPYTGLNDGTMDLALIPRVFRFTNLQIIRKVAMYGARFITDEYPDVKVYRVSRWKVTPGALIGPSREDTDQAAEQGQHSG

SEQ ID NO: 161762 - protein, 115 aa, Heterodera glycines
CRCNDLHWSAVRSVTFRAIYQCWEQIVSDGKYSRPVLASRCSAGVRSVKRVKGRQHLRLSPFWVDPQTAKYSRAAPLALITALNSSLGKASFAITGHMNIAVRHYGNCSFCVHAL

SEQ ID NO: 161763 - protein, 80 aa, Heterodera glycines
  unsure (1)..(80): unsure at all Xaa locations
MMASGNNSSAGMGAMIKTFVTAGLFFSSLETGGAATTGRXKRLQEKHTRSVASDVTNRSMVAPPPAAHTTLGANRLKMMP

SEQ ID NO: 161764 - protein, 148 aa, Heterodera glycines
  unsure (1)..(148): unsure at all Xaa locations
MPNIFKILLIALLAVVSFRLXSASTGDKKXTANDGSGNNSSTGIGTKIKRIVTAGLLFTFLSTGGAEAIGLSNAHGGNAAGLVATCTVTXNRSMAPPPPPVQFEMGANRLEKMKAHLHELAEKMPVTESKRLSPSGPDPHHHYGHGWI

SEQ ID NO: 161765 - protein, 116 aa, Heterodera glycines
SSALFVHTILSNIPDHFSSFSPLQLADGGERRPNSISLLRAQTNSDIIKVVPGSMCCVPTEINKAGIVNIVRLFVLPLSHLSKLASLHHPIGIMFAHSNRISASGGDQVKWNNCFV

SEQ ID NO: 161766 - protein, 89 aa, Heterodera glycines
VCLWWRKRPIGFVVSTQTNAHIIKVVPNRMFSVSVQMNNAGIVHIVGYSSSHRTTCPIWHRFITQLAFCVIIVIVSLFVLLTNSYGPDA

SEQ ID NO: 161767 - protein, 55 aa, Heterodera glycines
SHIPSLALINAPLWSLSAFSSAGKWCPSTPLWASVAISVSNSVCSIATKGKEPKS

SEQ ID NO: 161768 - protein, 154 aa, Heterodera glycines
  unsure (1)..(154): unsure at all Xaa locations
KPPEDVLGVHAELEFWRISTSYIGACCAESVSPLERLLETSKEEKVDEISFHILCCGRLRRRMWTFLERPGSSLQAKTFQLCSTLFVMVSVLGLSFGTIPDFQVTEYIPTGNRSVITSNGTSIEREEFXAVRVEHPAFVFTERIRIAFFTIEYC

SEQ ID NO: 161769 - protein, 35 aa, Heterodera glycines
GGGGFFFLGGGRPPPPPPPPKKKKNFFFFFFSPPP

SEQ ID NO: 161770 - protein, 87 aa, Heterodera glycines
SPVVSINSQSACTIRCVDEKTFGIECQRPYHAIVSIQFVKIGIVLLCIPPRFVDRGISVLYNQLQPRKQKHISVKFFLPGCVICPLK

SEQ ID NO: 161771 - protein, 47 aa, Heterodera glycines
WTEQWYGASKICSLDELTPWNYFNQYCQSDTRFSSKHIHAKKNSLVI

SEQ ID NO: 161772 - protein, 259 aa, Heterodera glycines
RRIGCVGDTKRTMRRRVNEVIDEFGLEECRHELVGFSGVEKSILGGETRRLLFASELLNNPQIIFADEPTTGLDFSMADSVISVMRALALSGRTIICTIVQPPLDIYWMAAGNNARLTRDELFRAVERLRESILLMDTERARFRRSNGALLRMIVRLSGGIPPNFNHAHFAAAAQPVVNVTAVLANANPTGQNYQRLLNLNADLTETIARLTVEISQLGYMNEQLTEQLEHLTEVPPNANFNLDDVAFHPPLDQQHQVP

SEQ ID NO: 161773 - protein, 164 aa, Heterodera glycines
  unsure (1)..(164): unsure at all Xaa locations
PNLRLGDVTSVNLTKXEGGVQTNVIPAQFVAYFDMRVTPTDDFQQMEAMIANWCKEAGPDVTFEFVQKGMCKSLTPTDASSPWWHAFSSALSEEKCAFSKEIFIGGTDARFLREKGIPAIGFSPMNNTPILLHDHNEFLNEGVFLRGVKIYTKMIPRLANLPSF

SEQ ID NO: 161774 - protein, 80 aa, Heterodera glycines
  unsure (1)..(80): unsure at all Xaa locations
KKGGXXPFPRENXXKGGGGFSYPPPLLTLFVFIKKGFFFPPHPAGGGXXIXPHPPPRKKPPHFFFFFLRVPPPPKKKKKK

SEQ ID NO: 161775 - protein, 114 aa, Heterodera glycines
  unsure (1)..(114): unsure at all Xaa locations
MKEMGHAASHMKHWVPLWGMQSPQPGDNPPPPPFLWGEKAPPPPGGPPPLGEKIWAPGGKKPPKKRGAQKEGGGPPPPPPKKKKKKNPPPQKEGGGKKKGGXLNNPPPGGGGKK

SEQ ID NO: 161776 - protein, 34 aa, Heterodera glycines
ARRGNLNAKKSNSALGTSHRDGSRKCICHWRRTP

SEQ ID NO: 161777 - protein, 26 aa, Heterodera glycines
LRKNVHPHHRFDKRLVIQEYIKVISA

SEQ ID NO: 161778 - protein, 30 aa, Heterodera glycines
GTPSPSIPTLSGSTNSSQSSALNTGLSVRL

SEQ ID NO: 161779 - protein, 25 aa, Heterodera glycines
VVSSPKSEAKRRENEWDSKNKKILA

SEQ ID NO: 161780 - protein, 27 aa, Heterodera glycines
FFGPFAAEVDLSQWSMGKRCRLTKIGC

SEQ ID NO: 161781 - protein, 82 aa, Heterodera glycines
KKKKNCFFPQKKILNSLFFWDKKKKGFLPPKKVLKKRGGKNTFPNFKAPNLEDGSNQRPKCPIQASLHSPRFIFECLTSVHF

SEQ ID NO: 161782 - protein, 169 aa, Heterodera glycines
  unsure (1)..(169): unsure at all Xaa locations
VGARRSSRRVICSIAQNTDGLDKMHETAQEYPDNAAPELREIXLDVLDLLDICLTXAGTLCIPVFLLKMTGQSSRFMCEVVPCDDLRHFSSQKHYVGAKMCRPLPQTRMHHHRMPFVFGSDANAFFEFYXELLNSPDKACQLHTQAFXDAIAVIXSLNEDSIRDCDLVM

SEQ ID NO: 161783 - protein, 213 aa, Heterodera glycines
FLLCPYNGIAAKSKCADRSGRQVNKLFIMPPNRPTRIKKAMNILFGRTEEEKRVTGNFVSRIAGRNPRREDMPTTHDWPSVWTTAQYFRSSVVPLPVRMGFRRRPERFAPKGPYGNLELMKIPNFLHLTPAHVQRHGHAIKKFCTKFPEELKQADVNEQYTPLRLVYSDYFHHGNIIRDKRAREVTAKIQLNSFGLKDTHAHNKCRQLVGDRY

SEQ ID NO: 161784 - protein, 258 aa, Heterodera glycines
  unsure (1)..(258): unsure at all Xaa locations
KDGKLFGRGSPMXQGPVLGWLNVIETMQGLGIDMPINIKFVFEGMEECGSDGLDECLEQRKDFLSGVDFVCISDNYWLGKQKPCITYGLRGLSPFAIEISGPNQDLHSGVYGGTIHEPMNDLCWLLSQLTDTKANILIKNIDKMVAKLTEEERNTYTKIDFDLNGFKKDVGVEKLTSEDPKQILMRRWREPALSIHGIEGAFSGKGFKTVIPSKVTGKFSIRIVPDMVPEEVDKIVVDFVSEVWKGRGSPTNENPSVG

SEQ ID NO: 161785 - protein, 26 aa, Heterodera glycines
SFTVVPILFCFFLPALSIYKPNWDSI

SEQ ID NO: 161786 - protein, 30 aa, Heterodera glycines
SRFFRRLVHVRQMDFEFAAWQMLYLLVNPH

SEQ ID NO: 161787 - protein, 151 aa, Heterodera glycines
  unsure (1)..(151): unsure at all Xaa locations
SRFFRRLVXVRQMDFEFAAWQMLYLLVIRKRSQDXWARDDPAFLLLLALSLLGSSVLFALALNLSFSSFCAFFLWVVFIDCIGIGIAIATALWFISNRFLRRTRDCDVVEGAYCFDVHLNAFFPLLILLHVVLPLLFYGPSFFSFFEQNIF

SEQ ID NO: 161788 - protein, 211 aa, Heterodera glycines
FSHILFDFFALLCLIHMIDFKRECNGRLGYTLVEDDSSLLGGITFRSIVSGDKLPLLRDSPPESHVEPVAQLLRSPRDHMDNIFNPADNNIVDNTNGFALAPYTEQRRAPSGVLAQQTMQRFGNAYFMGNSNNSTNNTTTSSAYSLATIGTNTTTYSGGACNGSGGTLVTNATGTTGGRRKEVYTDGILLDCDTNRILSGGGVDFRSANAP

SEQ ID NO: 161789 - protein, 101 aa, Heterodera glycines
  unsure (1)..(101): unsure at all Xaa locations
FLPKRCRWXAAFXXAVFFFCPPLFFKKRKYFTNPFNPGNLAGGPENCLKKKIGKRGPLFFFPPRPKGGGFFWAPPRGEILEFFFGGGAGAPKKKKKKFFFF

SEQ ID NO: 161790 - protein, 60 aa, Heterodera glycines
  unsure (1)..(60): unsure at all Xaa locations
DSSLYEVFRLXLIXYINIWKKDYGANWIFDPKNPFGKKGPFIKKTPPPFFKKNFFFPPKK

SEQ ID NO: 161791 - protein, 112 aa, Heterodera glycines
  unsure (1)..(112): unsure at all Xaa locations
FFFFFSPLFSQKKNGFFLKNPPRGGDKILGGTFPRGQIFLKKPFWGGPFQKTLFLFQGIKQREKGTPAQKPFDANGCHLXEXXHCESISQPGWPKKNTQWAFVYAMARQRKG

SEQ ID NO: 161792 - protein, 28 aa, Heterodera glycines
VYSLKAVPSLISFINSTSSMAFQSVSSS

SEQ ID NO: 161793 - protein, 68 aa, Heterodera glycines
PPLWGGGGAPPRKIFGPRGGPPPKWVQGGFSGNWVIPPTNVRIMVERGNSRNVHSLRRQRPNGKTAEF

SEQ ID NO: 161794 - protein, 63 aa, Heterodera glycines
PLFFFFFWGPPFFQGFFFSKIFSARGKPIPGGDWDGLFDDDGTGAVIDQTSRCAGRSARPPPS

SEQ ID NO: 161795 - protein, 34 aa, Heterodera glycines
  unsure (1)..(34): unsure at all Xaa locations
MVCLVMAVLMEMANXKAVKKDNKKGAVAASPAKG

SEQ ID NO: 161796 - protein, 60 aa, Heterodera glycines
KCLWEKVWSPKTKLEKKWRGGNFAPKKGGRKLGGRLTAPFFKGGGGGGKKSVAPPLYFFL

SEQ ID NO: 161797 - protein, 90 aa, Heterodera glycines
  unsure (1)..(90): unsure at all Xaa locations
KAVDQCSSPRPGGLALRRLESTLXLLPVARRPRPXAVVMKTETHWRKSAPLEDGPPFARKFSRKISFPIFQIKKLGPFLKNFPPSFPPGF

SEQ ID NO: 161798 - protein, 71 aa, Heterodera glycines
  unsure (1)..(71): unsure at all Xaa locations
XXXLXXQRLXXXXXXXXXXXXXXXXXXXXXXRXGXDTSLVVPTKMKEIAESSSSRSEKCRRYCARLTLTML

SEQ ID NO: 161799 - protein, 39 aa, Heterodera glycines
MNFLLSCLAVQNTLQIHVQTISWKEYEANALKSDGELER

SEQ ID NO: 161800 - protein, 27 aa, Heterodera glycines
KRAPHSELNSKRLLPLELKAVTPAELG

SEQ ID NO: 161801 - protein, 28 aa, Heterodera glycines
EIFCISTDNNFRETAQHYYFFLMCQSYW

SEQ ID NO: 161802 - protein, 25 aa, Heterodera glycines
GRFVAKCFLRSGNRSGTDPHSPRSL

SEQ ID NO: 161803 - protein, 121 aa, Heterodera glycines
  unsure (1)..(121): unsure at all Xaa locations
PPPPPKKGGEKFLLPSFGEKKNGFFFFQKKEKGFFFSPQGKNFFVGGEKKKTFLGEKNLGGAPVGTKKVFVPQRGPKKFPGGGPGGLFGGSXPKRVLXPXGAYTCPVSISMDCSYLATISE

SEQ ID NO: 161804 - protein, 25 aa, Heterodera glycines
DGADEAFKRKAFRDWSTVCLTNAYS

SEQ ID NO: 161805 - protein, 38 aa, Heterodera glycines
TDVKQSKINLAVHDVWMDILPLFDRPQLGLKLAMLSPR

SEQ ID NO: 161806 - protein, 248 aa, Heterodera glycines
  unsure (1)..(248): unsure at all Xaa locations
ERVLGFCDFXLGPDKFPKGFEFDVEGPNFPIEGFRFVGLISMIDPPRAAVPDAVAKCRSAGIKVVMVTGDHPITAKAIAKSVGIISEGMETVEDIAVRKEISVDQVDPREAKAIVIHGSDLREMNEDQLAEVINNHDEIVFARTSPQQKLMIVEGFQRQGQIVAVTGDGVNDSPALKKADIGVAMGIAGSDVSKQAADMILLDDNFASIVTGVXESRLIFDNLKKSIAYTLTSNIPEISPFLMYILFG

SEQ ID NO: 161807 - protein, 152 aa, Heterodera glycines
  unsure (1)..(152): unsure at all Xaa locations
FFFFFFXKQFEVLLRKQSSTFWTMSRKKEGKSVEMTEKRKRKAVLHQTLESKQQNKQLSASRRRLLSPNFIIIRRSFSYASLSHPFVAVALFIFPLTVCATGRTRVSGTSGVQSVLAGTAGALASAPRWYGAQCMPACWERLLRQGGPHQSD

SEQ ID NO: 161808 - protein, 27 aa, Heterodera glycines
LTKIYRQFNEMSRCFLHFYTVKTDEKG

SEQ ID NO: 161809 - protein, 27 aa, Heterodera glycines
QTQVSLGPVVCFGSTLECVTNHSGPNR

SEQ ID NO: 161810 - protein, 26 aa, Heterodera glycines
KVLKFASWVILILCSLYGGLFLSFCE

SEQ ID NO: 161811 - protein, 55 aa, Heterodera glycines
GKKKKKTFFFIKKKKCKFCFFYLGRKKPPPTNFGGGGFFSKKFFFFFLFEKKKKK

SEQ ID NO: 161812 - protein, 42 aa, Heterodera glycines
  unsure (1)..(42): unsure at all Xaa locations
QYSPSSXQYSPSSPQYSPSSPXYSPSSPQYSPSSPQYSPSSP

SEQ ID NO: 161813 - protein, 94 aa, Heterodera glycines
  unsure (1)..(94): unsure at all Xaa locations
ILGQVFFQVGVISAFNFPAAVYGWNAALALVCGNSVLWKPSPSTPLTSIAITRLVGEVLSKNGLSPDICSLICGGGDVXMCLGKDPRVNLVSFT

SEQ ID NO: 161814 - protein, 235 aa, Heterodera glycines
  unsure (1)..(235): unsure at all Xaa locations
GKVLLFEGXEGGKVGELVDETCKGAAAHSGGVFALNWHSGGIKLATASGDKTIKIWDVPGRKLIGTVSFGSAIEDQQLAVVWLRNWIVSVSLSGFINYICPETLKVCRVLRGHNKSITALTLSEDRRMAFTADFEGHITRWNVSDGSSERVTPQVHKSQVSGLSLTSGGLLISIGWDDSVAFIENALSPSIENVQSLSHRLSSQPRGVASIGQNGERVAVACHRXIFIXTDKKQS

SEQ ID NO: 161815 - protein, 133 aa, Heterodera glycines
  unsure (1)..(133): unsure at all Xaa locations
LSEPKTXXLQVPITSPDNISQLCTPSNPSPPQGILSLPEFANSYQLDIISALRGNEHDFLAKAAIADAIRAVQSDEDKMELIDFIASEEHGAIALTXENNACKMFNCSPSELPLVSSNYKTKKHFLSELCELF

SEQ ID NO: 161816 - protein, 46 aa, Heterodera glycines
AISVDFCSFCASSKSNERRILSRINWVEKFGFDQLSLHLCRSVKST

SEQ ID NO: 161817 - protein, 124 aa, Heterodera glycines
KKKKKKFFFFGRGGFFFFFFEGRGEKFFGFFFPPQKKRVVWGGPSFFFFFFFFFKKKTPRVGGGIYLWGPQKKKKNVGGKRPPPPQKGKTPFPFSFFPIKVFNWPLLKTFKGAIHKNTDGERFS

SEQ ID NO: 161818 - protein, 124 aa, Heterodera glycines
  unsure (1)..(124): unsure at all Xaa locations
AFAGAMKQTDKKSEDGKESLSPTLPPYDKWAAGVCFAMRFTQYFIYTNLETIGSGYAMMXVMLGQESXGYYKSLGPCLGPGFFPILQIPGLLFFWGLGEKKKKTPKGAFGVPFFSPPFFFFFWG

SEQ ID NO: 161819 - protein, 39 aa, Heterodera glycines
  unsure (1)..(39): unsure at all Xaa locations
WPPPLQSVVRYXXMVEDKLCSTRILAEXGRVQWRVTAEI

SEQ ID NO: 161820 - protein, 25 aa, Heterodera glycines
QRTEPLRTTAEWLLETDGTALLRVL

SEQ ID NO: 161821 - protein, 26 aa, Heterodera glycines
ENSHPCTSMDGLSSKFFCSAAWDKGN

SEQ ID NO: 161822 - protein, 28 aa, Heterodera glycines
RDGQRTCRNMPRLCFVGTVKAGDQPLAS

SEQ ID NO: 161823 - protein, 139 aa, Heterodera glycines
EKKNPPPPPPPVEYFPRRWVFYTPPKKPPLLGEKKKNIFLPPNKRVGEKKTFFWVKKFFFPENFSLGAPPPQKIFFSQKKKHWGGKKKVGSGIPPNFGLVPRSGENVGKKFFQQNTFPSKSIPRSLLQLHCSLLPQSQK

SEQ ID NO: 161824 - protein, 23 aa, Heterodera glycines
IVSYLRHLNGTETYTKGAAGPRP

SEQ ID NO: 161825 - protein, 31 aa, Heterodera glycines
  unsure (1)..(31): unsure at all Xaa locations
IGQRRGRGRRESNXKGRQNKSTALCPNICRK

SEQ ID NO: 161826 - protein, 135 aa, Heterodera glycines
MDVHDEEVEIIGTRSNERQMDRAHRQEQQQEKFYSQQQMSEESEEALFCISKHDVKEISQVVKAMAFRDHCTLNVSNEGIRLAVDDQHNQQGSAYFRSEHFQDFNFRTQTCSIKIPMRPLMEALNMFSGTMTMVF

SEQ ID NO: 161827 - protein, 70 aa, Heterodera glycines
PGGGGVFFLKLGGPPIEKIFGPKKKFAGCPIWAFVGVVGRQLLTNWHRVRFCCCGVPSTAVVAGRGRRCW

SEQ ID NO: 161828 - protein, 114 aa, Heterodera glycines
MRGGGGGGGGISLSSLFAKRKREKKEKGSAPAPPPRSIGEKKKVAAPTNKKEKSGGGPPPKRKGFFFFCGGRPPPCIKKGFFFIPPRGGGRFFFSFLKKMWPPPFPRSLLKNST

SEQ ID NO: 161829 - protein, 25 aa, Heterodera glycines
VKEMRLWTKCVQLITYLLLSFVALT

SEQ ID NO: 161830 - protein, 85 aa, Heterodera glycines
DSVVQQRRHSTCPSSQVGQFAPSHQLRCCYCCCSCHCPSAHHFEIGPMGKAPLQTACQLWHRFCGNSRSSPSKTNPSSSLWHFRR

SEQ ID NO: 161831 - protein, 73 aa, Heterodera glycines
  unsure (1)..(73): unsure at all Xaa locations
FFFFKKKFFFSAKKKKIKTPLFLLGGGPPPPPKKRGGGVFQKIFARGGGAPLQKGGEFLESHSPKLGYFFQXG

SEQ ID NO: 161832 - protein, 93 aa, Heterodera glycines
  unsure (1)..(93): unsure at all Xaa locations
PPPLGVKKKGGPPPPFPPGRRGETPFWVGENGKFQTGGPIVSAPESFFALRFDIFLFHISGXHVTXSXXANNSKLIGXLVKWWCCAWYGSFFG

SEQ ID NO: 161833 - protein, 222 aa, Heterodera glycines
HVRSPQIGSATFNANFNPQMALDMCNDLGANLGKGIVLISHFHLLYNCVPLDVAVQVDWNLFYNEYLGLSSEERQLIHSMGLSEAVLIRHIHSHHQQKDPSKGMRIYVVFMLRQIWNQKPLWEVARYFGVPRGWLQSVLQSAVCQSSSIVRFAERTPDLWALRSLLPEMVRRLCECSRQELIPLLRIECVKIGRARQLYENGFRTVGSISKAEPCQLIKALG

SEQ ID NO: 161834 - protein, 154 aa, Heterodera glycines
RRRRRKQRHRARKRRRRRRRRRKRRSGQRRRKHQRKEQRKRRRTRHRRRRRRSRRTRRRRRRRRRRRARRRRRRTRRRPARRRSAGCSEPNGSLSERPKTRDEARRTRDPLTGEPSNPQTFSHHFHPFILPLEFILNFSTFFVKFSVNKTMISY

SEQ ID NO: 161835 - protein, 30 aa, Heterodera glycines
MVCLVMAVLMEMANSKAVKKDNKKGAVAAS

SEQ ID NO: 161836 - protein, 32 aa, Heterodera glycines
EMVGTWHFAMFCRFIRIYLSVSIRTLGGRDSR

SEQ ID NO: 161837 - protein, 74 aa, Heterodera glycines
RIMHVQGVGDFFPFVCPLLLAVIPLSIKLVVPRQSSLLAPPLWMGSSKGSVYYRASKCSACHYQEGEKAVHAGL

SEQ ID NO: 161838 - protein, 75 aa, Heterodera glycines
  unsure (1)..(75): unsure at all Xaa locations
GGGFFFFFFFPTPPLFFKKNFFFHKKILAAFPKKFLGGPQIFCQTQRPFQWHAXLTVFNWVSXCTTTSWRSAAAV

SEQ ID NO: 161839 - protein, 70 aa, Heterodera glycines
MASSFCSSIISIVAIVCLLCKCCFSTPHPCCPGSQHVVSMMKDHTGTFSASMPKSSLCMSAERVAAAVEN

SEQ ID NO: 161840 - protein, 82 aa, Heterodera glycines
  unsure (1)..(82): unsure at all Xaa locations
KKKKKKIFFPAEKKKQRGKEGVFVFPTKRVNSQPGFTKNGXMFLSGVKGRPPXCSSSVXVLFHFHIVRMDPEKFGVLSARRG

SEQ ID NO: 161841 - protein, 69 aa, Heterodera glycines
  unsure (1)..(69): unsure at all Xaa locations
HETSTYNFTALRDTSLFSRAYEKFSGXWIGWNFGGPKRANFPGFGDHQFFEKNWGGNTKNFFFFLGAPP

SEQ ID NO: 161842 - protein, 67 aa, Heterodera glycines
GGGGVFFFPPPLFFKKKGGGGPPPPPPKKKKKKPPEKKKKKRGGVKKFLGGKTHGGENFCGSFGGLF

SEQ ID NO: 161843 - protein, 35 aa, Heterodera glycines
LPNVFVLLLDAYHQFHHVLSVCQYFVYKCIARGCA

SEQ ID NO: 161844 - protein, 26 aa, Heterodera glycines
  unsure (1)..(26): unsure at all Xaa locations
KRQXLGRCYADAFEQLGLISGSSTTS

SEQ ID NO: 161845 - protein, 26 aa, Heterodera glycines
  unsure (1)..(26): unsure at all Xaa locations
RRASXSTSRLCSYSPFSRFLLSTSFP

SEQ ID NO: 161846 - protein, 212 aa, Heterodera glycines
  unsure (1)..(212): unsure at all Xaa locations
RGHVRDVFDXARAAAXCVLFFDELDSIAKSRGGNVGDAGGAADRVINQVLTEMDGMGSKKNVFIIGATNRPDIIDSAILRPGRLDQLIYIPLPDEPSRLQIYRASLRKTPIAKDAELEYLAKVTVGFSGADITEICQRACKLAIRESIEKAVAIEKDRQAKEQRGEEVMDVAEDPVPQLTRKHFEDAMKFARRSIFDNDIRKYEMFAQTLQQ

SEQ ID NO: 161847 - protein, 106 aa, Heterodera glycines
GCTTPVIIPKPFAPYISRIAFPIPCQFGHSCDRYLCFVGALGLGEPLKQNFWGPPQGNLGGPLFFFCWGPPKAGGGGPPPLFFSPPLLSIKKPPPPPPQKKKPPPP

SEQ ID NO: 161848 - protein, 54 aa, Heterodera glycines
  unsure (1)..(54): unsure at all Xaa locations
GGGGENPPFFWGVFGREQARSQGHGPRGCGYSAAPXLCPLAQVXGSSSARTTRP

SEQ ID NO: 161849 - protein, 50 aa, Heterodera glycines
PDNYVIGQIIINYSLIFKLCIFLFWFIAILILTFASFLLPPLINILLNNF

SEQ ID NO: 161850 - protein, 236 aa, Heterodera glycines
MDSEENDLGQAVESSSVDVQQQMTTKSDEDADISNNGTVVPSRQTVSSGNERMGGMDLSGEPALLFSAETSFEAINASNKFAQRLLQPFKPLPLAQLLSGSATVGNVYLLQNGAHSKIGGPSTPLPYNSLISAFTPSAAGGSSSSTSGGMMFSSPLDSCKTEEANETGGDSNSTTQMMPWRMGGRHGKNDGQRTSSLDATSVGSSSVDWSPPESRKHSRRNTALGGGSSTATSAHF

SEQ ID NO: 161851 - protein, 218 aa, Heterodera glycines
MSSEIAKNATANKGNDFRTARKISSLEMDENTGEGNKQKMQQTKGRAGERNWIIVTRISDRSMFYKTFELVSQIGQGNFSDVFLVFSSEKGEKYAVKEIDKERMRSKLHFVENEVALLQRCRHRNICRLIDAFECRRAFFLLFDYAQKGDLFETIRRIGRLSERSAAQITRQISSALAFLHRRRIVHRDVRPENILLGADSTAKLTDFGLACFFLGPL

SEQ ID NO: 161852 - protein, 47 aa, Heterodera glycines
  unsure (1)..(47): unsure at all Xaa locations
FFFFFFXXASVARVQPRTSKGITDLLLLNFVRLNTENPSKKLCPQKQ

SEQ ID NO: 161853 - protein, 170 aa, Heterodera glycines
  unsure (1)..(170): unsure at all Xaa locations
GRHRGRPEHAVPGRGGHPRRMGAAGAPVRPLPRRVDRARSGRRRGXSRRPVPWADAASRAASASRRPAGRPGPLPAAPPTGRVTAPPADRPAAPDWSGALHDDRRARPHHRDRHGRAARGRRGPRRRAAPRGAGDPRRAHLPQHHRLDGRPVPPAGQRGGAQRHRRRRRG

SEQ ID NO: 161854 - protein, 173 aa, Heterodera glycines
  unsure (1)..(173): unsure at all Xaa locations
HFEQLLAKADXTEEQSKKLLSAMXAYLQPNPALRMGDLFYEKMEITSPAPNRSNTLEYLSEAMQEAAQSFGTETPFGGALQKIAQTEAKLGAAEREMVQTTAGQTLVPIKRFLEGEMRNIQRERRVLQKKRLDLDAAKSRLKRARTLEGQATRTETNYLFVXQAEADLRVAQA

SEQ ID NO: 161855 - protein, 88 aa, Heterodera glycines
MSFLRLITFVLLITLCSLPSLVESGLIGIVGTPVEAAWCGVLGKESSHCPTAGGGQHGGGGGGGNYGGGAPGGNYGGSSGSYNGHRAR

SEQ ID NO: 161856 - protein, 100 aa, Heterodera glycines
RFYYFVINFLSFLETETNGAITTDNEPKIHAEKNETGDAAVGQKSTEEQFDKTDKKAEQQNVLDVNKTQQEPKAPLDEVKETPQEDNSEEVPTEAIVVDV

SEQ ID NO: 161857 - protein, 84 aa, Heterodera glycines
  unsure (1)..(84): unsure at all Xaa locations
MTSILKNQIIKHLSAFARNLKPEQITMELLRGKGQLRDLELNEEVLAEKLELPPWLKIVSARCDRVSIKIPSWNKXEECSHPIV

SEQ ID NO: 161858 - protein, 66 aa, Heterodera glycines
GRQDLLIIYYRTDWISGDNRTDRWSARCKTCSLNRTIGLWTTYCLNCPMDWKRCPILSTVLSGTII

SEQ ID NO: 161859 - protein, 175 aa, Heterodera glycines
QWACCGLHTFTLCISAHWAKCAGPLCRRHATDTQIVRPKYEGSCREAGDLPRKAMRAALAFYDRTVRHRFADGSSGGEAQREELKLCLNSLVSTLESADAEREAKWERLKQFLRVCGTAAIFAVLAFLFTLYWPLFSSLAVGVVRTVWTLISSLRDLLVAHWPDLLFGVCSSALS

SEQ ID NO: 161860 - protein, 108 aa, Heterodera glycines
PPRFEMDLNISPTLEDPNASLVDNEQTADEKMEKPNSSANVSFSNVTDKFRAHPVEKVGSPITINQSISDPTTELTEEDIFRMKSMSIEQNGWKNGPCASELQSAVSQ

SEQ ID NO: 161861 - protein, 141 aa, Heterodera glycines
MRKIIPPNALMNILPKQGLSWPLAAFFMVTDMAIGGMVTLPGAICRIGLSRGLALLLLSGLFCCCSAILLGQCWLFVLDKSPQLRQKHCRRPYAEIGFCALGRWMSILVSVGVNVTQFGIATVFLLLCAVNLSRICSTLFH

SEQ ID NO: 161862 - protein, 80 aa, Heterodera glycines
RQRALDYLSGCIEQVAQFGDILQLVIVELIYKVCHNNPGERNRFIRCVYNLLQSQSGAVRYEAAGTLVTLSTAPTAVKAA

SEQ ID NO: 161863 - protein, 145 aa, Heterodera glycines
MSSLLLSIFPIVFLVCCNAMPNFPCCPGSQQVVAVMSKYIDTFSSAADESTVCSTAKSTVDGIKNELSSRGGCQNGGEAQIVDEIDRQLKNIAKMEINYEDECPYNLGFARAMFDLAAAAAGHAGNGTEWQYMKVQFEQESQAIK

SEQ ID NO: 161864 - protein, 175 aa, Heterodera glycines
AGPLSSVSARLRLAGWHKYLTRNQIQPIAEREGDWSAMSGFQQTMQMLNEGIVPTAMLVANDQMALGAMRAITESGLRVGADISVVGYDDTEDSSCYIPPLTTIKQDFRLLGQTSVDRLLQLSQGQAVKGNQLLPVSLVKRKTTLAPNTQTASPRALADSLMQLARQVSRLESGQ

SEQ ID NO: 161865 - protein, 201 aa, Heterodera glycines
FGANAMALDLGSLSQGDASGGLKDALTQGAQIAVKQLGTPGGFSNNPDVKIGLPGKLGKVADKLKMFGMGDQVTQLETSMNKAAETAVTQAQPILVNAVKNMSVTDAKGILSGGQDSATQYLNKSSREEIRAKFLPIVKAATDKVGVAQQYNALAGKAAAFGAVDAKSANVENYVTEQALDGLFKMIAQQEETIRKNPAAA

SEQ ID NO: 161866 - protein, 141 aa, Heterodera glycines
YGYPQNQGITQERTCEQKASKRPGTVKRPRCWRFSIGSAPLTSITKIDAQVRGGETRQDYKDTRRFPLEAPSCALLFRPCRLPDTCPPFSLREAWRFLIAHAVGISVRCRSFAPSWAVCTNPPFSPTAAPYPVTIVLSPTR

SEQ ID NO: 161867 - protein, 152 aa, Heterodera glycines
NWQAIRSEALHLHGAGNIKRSEQYDDIGFNSFFKSGWKRFYLKWYDEAHPSAGQLCPQTTALLRQIPSVKAAMFAELPPGSKLVRHRDPYAGSLRFHLGLFTPNDPACFIEVDGERYHWRDGEAVVFDETFIHYAENATEHNRIILFCDIER

SEQ ID NO: 161868 - protein, 86 aa, Heterodera glycines
EKTMSSSLIMNCLIALTILAVFVSTIDAIGMPMQCCGQQQQSCCGGGGGGCGRRKRDTEAVQPHFKSDETPCPQTEWRQVIDESIR

SEQ ID NO: 161869 - protein, 87 aa, Heterodera glycines
HRNWRRTPTDDPRGCCPFVSHHFPDHFGTSKTLMDNSQCYFWGNALMNTNSDNNFHPIISSSASLSRRSFVFRFSSPCACRLCFLGG

SEQ ID NO: 161870 - protein, 34 aa, Heterodera glycines
PHCHQYRQSLHSLNQSALAHGDTMKRHSDAFWRP

SEQ ID NO: 161871 - protein, 34 aa, Heterodera glycines; identical to SEQ ID NO: 161870

SEQ ID NO: 161872 - protein, 178 aa, Heterodera glycines
LGKNPHFEQLLAKADKTEEQSKKLLSAMEAYLQPNPALRMGDLFYEKMEITSPAPNRSNTLEYLSEAMQEAAQSFGTETPFGGALQKIAQTEAKLGAAEREMVQTTAGQTLVPIKRFLEGEMRNIQRERRVLQKKRLDLDAAKSRLKRARTLEGQATRTETNYLFVEQAEADLRVAQA

SEQ ID NO: 161873 - protein, 30 aa, Heterodera glycines
KAQAQNSATKRTNRAIRDITKANLEFYLGG

SEQ ID NO: 161874 - protein, 97 aa, Heterodera glycines
MKTACFVAAAVVLATANAQIFRSADFEADKCNTQDLLAKAYPLLVNPNYSVCQKDADFQFYPITGLPSDEKLAKMCASPACQELLKVIAAADLPDCD

SEQ ID NO: 161875 - protein, 62 aa, Heterodera glycines
GRQAVAEGTFRPPYFHRNCMSEFMGLIVGRYEAKEGGFSAGGASLHSMMTPHGPDAACFEKA

SEQ ID NO: 161876 - protein, 56 aa, Heterodera glycines
THEEYECAISLSWERKHEALRRRPKGLIAYPFFFSFILVFPIYNDNLHVLCTVSLI

SEQ ID NO: 161877 - protein, 117 aa, Heterodera glycines
AAKVIVDQNAEQTDTESDPEDYEYDADPSSPREMCKFKRRRMTYSSGTAKPPKLENRRTSHVEFGSSMFDYDAQVMDIGLPLPTIQKVENVEIVIPSFRKKCGLLSDFSLSPTECER

SEQ ID NO: 161878 - protein, 134 aa, Heterodera glycines
QQTMQMLNEGIVPTAMLVANDQMALGAMRAITESGLRVGADISVVGYDDTEDSSCYIPPLTTIKQDFRLLGQTSVDRLLQLSQGQAVKGNQLLPVSLVKRKTTLAPNTQTASPRALADSLMQLARQVSRLESGQ

SEQ ID NO: 161879 - protein, 137 aa, Heterodera glycines
NEKAFFLNICIFKNFQNAPVSAIVSAAFHLLRLHDRLSNGLNCQQGAEIKPNGQKFNNTDQKCPQKDAKYCVTSICTTDEIPNYTNIAWFCDVIKNAEKCANRRKEKFTGLKNISCKCLYGEEGEDHGNAQFTPPPL

SEQ ID NO: 161880 - protein, 82 aa, Heterodera glycines
PSTRADCPWAFSSVPSMVAAHDAGPVEFFGSVLSLLLVVISPSFCSSAVCLFCLLRRIASSEAAANGGECANLKCAVAPWRP

SEQ ID NO: 161881 - protein, 146 aa, Heterodera glycines
AISACEQLAAGTLKINRERPLMERIQNVLLTRKPLLDAVVMRMARDKVMKQTHGNYPAPLRILDVVRTGLVDGQQEGYEEETKEFGYLTQTTQSEALIGLFKGQTECKKNKHGEARKTERLGVIGAGLMGAGIANVSIDKGIHTTL

SEQ ID NO: 161882 - protein, 103 aa, Heterodera glycines
LATIVVCIVGLSLIGSICIIWCHALSEFCLNRTDISSSSARKMFALCTIIGTRNTRTSRAQVLQRMPIEANKWEDLGQGGEAEDEDDDEQYCISEYVVLPTCG

SEQ ID NO: 161883 - protein, 149 aa, Heterodera glycines
DSDNGNNSAALPPRAHSARVHLKWPSPTGSMHAQYRRAAVATDHGLCSEIGRDVLLEGGNSVDSMIASLLCIGVVNPQSSGLGGGFIMTLYNTSTQRCTTIDARETAPLGTNSTMYVGTPRDSVIGYRSIAVPGELHGFWTAFTKFGSG

SEQ ID NO: 161884 - protein, 167 aa, Heterodera glycines
MLIREYRIVMPLTIEEYQIGQLFSVAEASRQETGGGEGVHVVRNEPFEGQSLFNGRFTSGQFTHKIIHLDTKVPAFLRTIMPRGSTTLHERSWNAFPYCKTEVTNPDYMKDDFLIRIETMHLSDRGTTKNALGLTKDVLKERKVVRIDIANDNEFLRAADILDNTRP

SEQ ID NO: 161885 - protein, 168 aa, Heterodera glycines
  unsure (1)..(168): unsure at all Xaa locations
MNSQLLCIFLLVICTVSIGTLTQAKPIPEEAAATETKADEGKKEEPKKEKPKRKRKKRRRRSRKRKKQRKERAKRKKLRKMKPXKGGAENGRGQKGRXQSPVPRPXLTEAADNVNKAVDDLSXLNRQKHXKNAAEATAEKTPXRAGKSIERSGRKRRKRTAEDGCQQN

SEQ ID NO: 161886 - protein, 80 aa, Heterodera glycines
GRQAFLHRSLLMNLPPSSSSSPVLFNRLTNRQTLAFSAIVRRVTRGFSTRQRNLYKVLGVSPSASQSDIKKAYYTDCVDE

SEQ ID NO: 161887 - protein, 124 aa, Heterodera glycines
AAKYKDSKFHRVIRNFMIQGGDFTRGDGTGGKSIFEGKSFEDENFKLHHYGAGWLIMANAGPDTNGSQFFITTVHTPWLDGRHVVFGKVLEGMNIVREIEDGETAGGDRPKKDVVIVDSGELTV

SEQ ID NO: 161888 - protein, 177 aa, Heterodera glycines
IINEKHENVKYLPGKKLPTNVIAVTDVVEASKNADVLIFIIPHQFLHKVCEQLKGNIKKSAIAISLIKGLATFHEKDIGLRLISNEIATSLGIDTSVLMGANLANEVADDHFCEATIGTKNPQHGNELKKLFHTDNFRINVVEDAATVELCGALKNIVACGAGFSVGLGYGDNTMAA

SEQ ID NO: 161889 - protein, 71 aa, Heterodera glycines
MSAAASAGQTHRWGGMAAPHRSRPPLRFDRTFLEERDNQLKLIQMLCGLVALLLTVQCWPNPLFPFCLGRV

SEQ ID NO: 161890 - protein, 51 aa, Heterodera glycines
DSQSVFTSAVLFYCFSSSFCWSTAAFFFISMGMVRPPLSAVFIPLMNTWRP

SEQ ID NO: 161891 - protein, 103 aa, Heterodera glycines; identical to SEQ ID NO: 161882

SEQ ID NO: 161892 - protein, 61 aa, Heterodera glycines
MEETPISLLRMAREAEKEQKEEKKEEKKEEKPEEGKKEEKKEEKKEEGKQEEKKEEKTEEK

SEQ ID NO: 161893 - protein, 61 aa, Heterodera glycines
RSHSFATAREYLPVPRHVHVRVAFLSLQFIVFSSFDCEIEQNQLNSEETEEEGAVHFILKN

SEQ ID NO: 161894 - protein, 143 aa, Heterodera glycines
  unsure (1)..(143): unsure at all Xaa locations
MSAKAVNEYSGKELLYRSLNHVQALVKPNAVQLDENHXFQDAIINCDWISKEGQGVLKPDQLIKRRGKHGLVKIGTTDELAKWFDEKKGQNVQIGKTTGRLSKFILEPLCKHGAKDELYIAIYSKMNEDVILFYEEGGVEVGD

SEQ ID NO: 161895 - protein, 98 aa, Heterodera glycines
HSQTENGRSQLGQFGEFFFSHPPLIRRERTDHRMDNESFVHSLKGPSFTPRPPPRRQPQALPLPPPPPASVSPTLAWLAPPRWLLRPLSSLGSPGLAA

SEQ ID NO: 161896 - protein, 76 aa, Heterodera glycines
  unsure (1)..(76): unsure at all Xaa locations
AAKNLLPAPLVGSILLLGHFVFVSVGSNFHVLKKRGYDESESYSSEEEPRQAPRXGGRFGGKRHRYPPAHGKGHRP

SEQ ID NO: 161897 - protein, 90 aa, Heterodera glycines
  unsure (1)..(90): unsure at all Xaa locations
GRQSLAQLKLSYYPKNADFDDTSSMVCQWMFWLLSWLLLLFTFPVSVCFCIKIXKEYERAVIFRLGRLIGGGAKGPGLFWVMPCIESFVR

SEQ ID NO: 161898 - protein, 166 aa, Heterodera glycines
MLVGEDGIVAGLSVGGTEPRPPTLQVEPTYSDNYVLDGQHMISESRMRDILMELQQRWLKEYEQSREKLLVELTEKLHQEYLTDLQRKQTEYMAQCREEMEAERVRQDELFQRRLQEEVQRLTEKQRREIQLIKKKQWCWQCEKEAIYHCCWNTAYCTVECQQAHW

SEQ ID NO: 161899 - protein, 95 aa, Heterodera glycines
AAKQNVLPSSDHFCSSETLCSLPSLVESGLIGIDGTPVEADWCGVLGKESSHCPTAGGGQHGGGGGGGNYGGGAPGGNYGGSSGSYNGHRARRFA

SEQ ID NO: 161900 - protein, 134 aa, Heterodera glycines
PPPGGGCAVRTLRGCDIDASLRYSVERALQAAVCLRKLARTETAIELNVLSDDGGAFAACLVAAGVAIASANIEMLDVLLACNVLLIPSNSLTAPLRIVFDPDKATIAAHVGKASALTMGVIPTIGQVVCAELS

SEQ ID NO: 161901 - protein, 34 aa, Heterodera glycines
KAQAQNSATKRTNRAIRDITKANLEFYLKPWRPL

SEQ ID NO: 161902 - protein, 70 aa, Heterodera glycines
QGRNCCFCSMSVPRALPLVNTLVLPLTRCLFVNFCKICVCFFIILINRISLVLYHSPFSSHSFLLFFVSL

SEQ ID NO: 161903 - protein, 63 aa, Heterodera glycines
PPSGENGQPGQPGNPGPQGYPGDGGSPGQPGNPGGSGEPGQPGAQGSSGQCYHCPPPRTAPGY

SEQ ID NO: 161904 - protein, 156 aa, Heterodera glycines
GRQEFSPTLCSNRRASGSAFSSPTNWTSAPTDRHCFSSCHSNGDILAEMQLLMARNIVLTGGNALFPGYRKRIEQELRSMMPEQFTLGVQQPSDPICHAWECARDAIQQQQHDAETSASSAAHVGAATQFSPRLTAKFDKLGLAGDIEAEHKGLLL

SEQ ID NO: 161905 - protein, 208 aa, Heterodera glycines
  unsure (1)..(208): unsure at all Xaa locations
PPSEIDVFLDFSHCRPSDQERALFFELEAVLQFAQRSADCLAIYGAGASAEVRAALQNCDDADIQNASFAIVRQFVRRIRKYFETAQRIEKVVPELLWELCSGPLPPVEQLDSAQALCKQLARLIDFVFHFDTMKMNTPAMQNDFSFFRRVISRSEAAAREAETDCSLELANXFSLFLASPTPMLNALTNATAXFVRDHPDLPVSNTT

SEQ ID NO: 161906 - protein, 32 aa, Heterodera glycines
KMPERLTYRRRLCYNTKSNKTKVVKTPGGRNV

SEQ ID NO: 161907 - protein, 151 aa, Heterodera glycines
ILRLLLAVSLLVTCCHGQKERKPKTGTTKTSTTTTTTTTTTTTTLPKMTAPNNTAANGGGGSGNTLLFILLGVGVFVALAVAVVVAVVVWRRRQARTDSYAVDGGDAAKGAASSDGANGAKKDAAKGGSSSSQTASVEKFSAVSSVPSSLK

SEQ ID NO: 161908 - protein, 171 aa, Heterodera glycines
  unsure (1)..(171): unsure at all Xaa locations
PSRAAAATAEKTPXRAGKSIERSGRKRRKRTAEDGCQQNFGGKSEKRRGIGKRSENENGNSFXGQQKGQRRVDFDNXRQKDDFGREGEADGGADSQNVGQHEEGAESEQQCRRRRLRQVVLRRRRAGGGHGGQSMINQSDRRIRHCCVMKCSQFFFFFFFKIHFYSKFGFM

SEQ ID NO: 161909 - protein, 54 aa, Heterodera glycines
QFFFFFFFFLVSRSFIISLSLARTLITQRNGTIGGLITLLIVRVLSVFALSLFT

SEQ ID NO: 161910 - protein, 98 aa, Heterodera glycines
QGFFFFFFFFSPILPLFFHKFSILFCSNFHLLEHLRSFGHIANTFEQWPSELSANDFVLQFLYFIVSSGQSNAYKQRANLLVTDLHFLQLCNFFAWRP

SEQ ID NO: 161911 - protein, 67 aa, Heterodera glycines
MAKMGFHSTKMEADLSKEQQGKREADSMRMLAFFGVCLSTVATMICVVSVPGAYEHFQQVGTKMQGE

SEQ ID NO: 161912 - protein, 56 aa, Heterodera glycines
  unsure (1)..(56): unsure at all Xaa locations
PSFSSLSAKTQETHIVLGIASVCSLLAIIATVVTPPSLYXEITPMPSKVESVLRWR

SEQ ID NO: 161913 - protein, 119 aa, Heterodera glycines
MARRRHGFAFSTDWSNGGAPPRFGCEFLRGKQRRERTTFSRAQLDVLEGVFKNTRDPDIFVREEMATKINLPESRVQVWFKNRRGKARSQKKAQQITHHHQSASSSSGSSVAGSNPSSA

SEQ ID NO: 161914 - protein, 90 aa, Heterodera glycines
AAKHYSSYIPRALWWCKCLQKFFGLLCFLLLVDCATILFWFFFGHVKKRRRPHKNEIFICGDCWLLVFDFLAPSQLGLEIALVNRRFNCI

SEQ ID NO: 161915 - protein, 131 aa, Heterodera glycines
AAKEWVLKVDDDIAGHVRRMVEWTEKKFGKMATEHPLIYFGVPADRGLSRDKNSKWYVPYEMFPGEHFPPFLCGGCYLTTPSTIKAVLEQAHKTNSFYLEDVLAVHGHFGRVGQCHRIGPIEPFLWEWIAV

SEQ ID NO: 161916 - protein, 45 aa, Heterodera glycines
AARRSPLRPGRRRWGRKQKGFGGQTKPIFRKKAKTTKKIVLRMEC

SEQ ID NO: 161917 - protein, 78 aa, Heterodera glycines
VVAVFVAVQLVDVGVVQQHLQLVVVLLLLHPLRRRRWHETMDKTLMMIMQIMLDDENGAAIGGQMLDPFLTKKCLLYF

SEQ ID NO: 161918 - protein, 177 aa, Heterodera glycines
GRVGRSHHQAYACLLRPPRQQITSDAEKRLEAIANTQDLGAGFVLATNDLEIRGAGELLGDGQSGRIQAVGFTLYMEMLERAVKAIRKGEQPNLDQPLGGGPEINLRLPALIPEDYLPDVHARLILYKRIASAADEEGLKDLQVEMIDRFGLLPEPTKNLVRLTLLKLQAEQLGIKK

SEQ ID NO: 161919 - protein, 47 aa, Heterodera glycines
FNFLIGLANGQKNRRQQKMNKQCQMEKLNKSHPRRQRPKMNQQILGG

SEQ ID NO: 161920 - protein, 59 aa, Heterodera glycines
MFSILHLYKNVVSKMANVDLALDEIIKSRPPPPPPAPQQRNFGGERPFRMSAYQSSRGR

SEQ ID NO: 161921 - protein, 133 aa, Heterodera glycines
  unsure (1)..(133): unsure at all Xaa locations
QPTQMVNEGIVPTAMLVPTDQMAXGAMRAIXESGLRVGADISVVGYHDXEHSSCYIPPLPTIKQDFRLLGQPSVHRLLQLSQAQAVKRNQLLPVSLVKRNPTLAPNTQTASPRALADSLMQLAPQVSRLESGQ

SEQ ID NO: 161922 - protein, 57 aa, Heterodera glycines
AAKKFETEMDNYAEERVKIFNFEKQKRRERPIRRRAPENLLRRAGGLKKCTDLRCEQ

SEQ ID NO: 161923 - protein, 68 aa, Heterodera glycines
VHTLSRRRVNIYQAEHVHVRVAFLSLQFIVFSSFDCEIEQNQLNSEETEEEGPRSFYTQKLNWISLGG

SEQ ID NO: 161924 - protein, 70 aa, Heterodera glycines
GRQDRFTMVDVSRTSDFRHSLNARLSTAPIMSHTLPMVPLLFLCWFTLRNGSVSPVIFPDSVRRSNRTNE

SEQ ID NO: 161925 - protein, 96 aa, Heterodera glycines
MAPPNPSLHRVHPLSPPAVPPHHGRQQSLLNPQKGHMPTFSAVPNDQKEHPKRRRSLRLMAFASVAFATVSVLASAITLPIVYSHVQSIQAFMQNE

SEQ ID NO: 161926 - protein, 87 aa, Heterodera glycines
DSQSVFTSAVLFYCFSSSFCWSTAAFFFISMGMVRPPLSAVFIPLMNKRPPSSSHLMLSFWMPSGMSTRREPSRWPDSLSFCSRLAA

SEQ ID NO: 161927 - protein, 37 aa, Heterodera glycines
HPNKYIRPSQGLIQCTEVRKMPPIRRKDRRNECRLAA

SEQ ID NO: 161928 - protein, 54 aa, Heterodera glycines
MSHPSHAVPLLFDRDNEAQLNLPTYEKLVNDQQKPSIGQNSRFQYIPNRCALEA

SEQ ID NO: 161929 - protein, 75 aa, Heterodera glycines
AAKHFRNFFSALRRAMTITISTPYPCFCLLLPIRLQFGRNDCGHRHAGHHPNSDKDENEEDCFTPSLVRSAFENS

SEQ ID NO: 161930 - protein, 70 aa, Heterodera glycines
VHILSPRRVNIYQAEHVHVRVAFLSLQFIVFSSFDCEIEQNQLHSEETEEEGAVPLHSKIELDFQLILAA

SEQ ID NO: 161931 - protein, 104 aa, Heterodera glycines
MSSSCTVFVVLLVIAICCCSLTIAMPAAGNEIDSVPLRQKRGYGYGGYGYGGYGYGGGMGGGGFGGGMGGGMGMGGGMGMGGGMGMGSGMGMGMGSGMGMGFGR

SEQ ID NO: 161932 - protein, 113 aa, Heterodera glycines
  unsure (1)..(113): unsure at all Xaa locations
GRQGLYGERVGGVAAVXCHXQDEGARVMSQLKILIRPMISNPPIHGARIASKILCDPKLRQQWLGEGKGMGDRIITMRSQLRDLWGKGGSKRNWDHIVNQIGVCCVTGIRPEQ

SEQ ID NO: 161933 - protein, 89 aa, Heterodera glycines
  unsure (1)..(89): unsure at all Xaa locations
GRQGKTDQILDMDMXLYDTQPANLSGLNEEFISGARLDNLVSTYTAIKGVVESLEDTDAFDADPNVGSRSAQGAQSHCFEWLLRRVLST

SEQ ID NO: 161934 - protein, 71 aa, Heterodera glycines
VHILSPARVNISQAEHVHVRVAFLSLQFIVFSSFDCEIEQNQLHSEETEEEGAVHLHSNIELDFQLIFLGG

SEQ ID NO: 161935 - protein, 63 aa, Heterodera glycines
TDNERARYHAAVLQLKRGTGSYEYNRIAYLHFDLRAMPGAHSGPTFLPWGREYLKRYEIGLRA

SEQ ID NO: 161936 - protein, 70 aa, Heterodera glycines
QITYAHTHLFWHTKRTKSSHTRCFGITPFGSPLNVLSAKNQRPKLTSSVGRESTRSRSSLKKWALSTWRP

SEQ ID NO: 161937 - protein, 158 aa, Heterodera glycines
  unsure (1)..(158): unsure at all Xaa locations
MKALGEACTPQECQLEAAVRGVASWGGTGVRYEPVSGGISNTNWRVEVAGIDTAYFFKVPGVGTEMFIDRRTAHDASLKAAQTGYGAPVFAFLEEFGVEVFEXMEGWRASSNHDFLXRDVRHNALHALKAFNDQPPLVQTKTVFDMIAEHQRQVEQLN

SEQ ID NO: 161938 - protein, 118 aa, Heterodera glycines
FPSFAPNRSVVVHKSRLRSSAALCAPSPPPQCLSILSLCALFSAAVPMSAAASAGQTHRWGGMAAPHRSRPPLRFDRTFLEERDNQVKLIQMLCGLVALLLTVQCWPNPLFPFCVGRV

SEQ ID NO: 161939 - protein, 53 aa, Heterodera glycines
AAIHLPFRPPAGTRRWSIFRGENQLRPALHPMGPIISTLAESEEQSPNSMEKK

SEQ ID NO: 161940 - protein, 90 aa, Heterodera glycines
SAQTNQCASVGAEAPAQRKRKKHTHRTRAQLEAQLVVVPLRLMVTGGSQRRRSPKTTRRRRASMGETRRGMGIHRPLAAKKHAPIVAWRP

SEQ ID NO: 161941 - protein, 87 aa, Heterodera glycines
  unsure (1)..(87): unsure at all Xaa locations
PPRRISINFFTRCGVESVNFINHLPEKLYFLESDGXVFHNLNDIDDGELIQLRFXACGGKGGGGVGLXXFRIHKSSNQLMCGNLQGG

SEQ ID NO: 161942 - protein, 89 aa, Heterodera glycines
AALLITGGVVGATGASIFVDRTKFYEETMKVSMGLAVVFGLAFLQFVLHVGMKPWLLVTCFIFGVCGLAAYPVGLQLSAECTFPVSETT

SEQ ID NO: 161943 - protein, 46 aa, Heterodera glycines
RKPNSSRNKRHRPSNSRLRKSSNRKTQMRSHLLCPMLTLRWRSLAA

SEQ ID NO: 161944 - protein, 175 aa, Heterodera glycines
RPEESQFRVVNVKPVTLYDVAEYAGVSYQTVSRVVTQASHVSAKTREKVEAAMAELNYIPNRVAQQLAGTQSLLIGVATSSLALHAPSQIVAAIKSRADQLGASVVVSMVARSGVEACKAAVHNLLAQRVSGLIINYPLDDQDAIAVEAACTNVPALFLIASAHTPINSIIFSHK

SEQ ID NO: 161945 - protein, 92 aa, Heterodera glycines
  unsure (1)..(92): unsure at all Xaa locations
ARDIGDGDPERMCPXGVAEYVKKTFENSSVRVSIIDDVDQIRRDYPLMSAVSRCANAIEEHKARVIWLEYDGGEETETLFLVGKGVTLDTGG

SEQ ID NO: 161946 - protein, 68 aa, Heterodera glycines
PPRPGQPGGQGPPGPPGAPGQPGQPGNSGQPGQPGAPGQPGKDSGYCACPPRSSVLAVKKKMAGAKKA

SEQ ID NO: 161947 - protein, 141 aa, Heterodera glycines
MQGHHHHHHNSHHQRHKRSYSSARHVLINFGFQFPHDFKLGSGRYSKVYKGFYREANRYFAIKITDLEAVSDRFKHKFVPRELKVWRELSHPNHVRLYKDFMKNDFLFEIIDLAVGGDMLNYLRNHGPVKEAVCSGWMLQL

SEQ ID NO: 161948 - protein, 114 aa, Heterodera glycines
TRNTASLLRLLLHRAGPKQTSDQWTSNRTALWTRSSRNFRARLSSSSLPKSVLRTFTSFAISPCSVLQQQSMLIRLQPPVVLCGDIHGQFRDLLRIFTTMGFPPDKKHLFLGDY

SEQ ID NO: 161949 - protein, 36 aa, Heterodera glycines
QLHRERVRGELIVCERVLVDPPAASVQNNAKNSWRP

SEQ ID NO: 161950 - protein, 134 aa, Heterodera glycines
  unsure (1)..(134): unsure at all Xaa locations
AALLAFFLGSAPLTGXTKIDAQVRGGETRQDYKDTRRFPLEAPSCALLFRPCRLPDTCPPFSLREAWRFLIAHAVGVSVRCRWFAPSWAVCTNPPFSPTAAPYPVTIVLSPTRXDTTYRHWQQPLVTGLAXRGV

SEQ ID NO: 161951 - protein, 89 aa, Heterodera glycines; identical to SEQ ID NO: 161942

SEQ ID NO: 161952 - protein, 54 aa, Heterodera glycines
TKCGNKKKNFINPVIRERYLHSYQFCLYILPLELTILIAITASFDKFFSSHHFT

SEQ ID NO: 161953 - protein, 115 aa, Heterodera glycines
GRQEQTRDEGKFVEWDGAEMGKVVVRFPPEASGYLHIGHAKAALLNQFYRHQFEGGLILRFDDTNPAKEDAHFEKVIEEDLRLLQVEWDKMSRTSDHFDALLDFCQQLLVAGKAY

SEQ ID NO: 161954 - protein, 54 aa, Heterodera glycines
IKLGTELGSLVTAASVLEFALRGSYTFFDLLKYKMAYLELVMALIKTLTNDPFI

SEQ ID NO: 161955 - protein, 94 aa, Heterodera glycines
  unsure (1)..(94): unsure at all Xaa locations
WHDVGLQPNNLPSIRYLTTSAFSKARYGFRPSGGAGQYAFRFKEAFAARQVAPTLRERLLGPTTGKPFIVGTYALAGASXFGIGMLCYYGLTTT

SEQ ID NO: 161956 - protein, 103 aa, Heterodera glycines
YGYPQNQGITQERTCEQKASKRPGTVKRRRCWRFSIGSAPLTSITKIDAQVRGGETRQEYKDTRRFPLEAPSCALLFRPCRLPDTCAPFSLREAWGFLIAHAV

SEQ ID NO: 161957 - protein, 82 aa, Heterodera glycines
MGKGRTTGNSGGGKGGSGGGGDEKSGGSGAGKGTVAAGSGGVRGKGAGQSGPAAAAAGTDKTRAAKAAAAARGAPAEESVKS

SEQ ID NO: 161958 - protein, 146 aa, Heterodera glycines
  unsure (1)..(146): unsure at all Xaa locations
AKGRQKAGNRKKAALLAFFLGSAPLTSITKIDAQVRGGETRQDYKDTRRVPLEAPSCALLFRPCRLPDTCPPFSLREAWRFLIAHAVGVSVRCRSFAPSWAVCTNPPFSPTAAPYPVTIVLSPTRXDTTYRHWQQPLGTGLAXRGV

SEQ ID NO: 161959 - protein, 75 aa, Heterodera glycines
PPRQKSPIIADNLGSFSDLDGKKNIEEILAAKREAIKRATAVLEMEVPAEEEEDNAKLIRWPQRWRWTKFEREAF

SEQ ID NO: 161960 - protein, 143 aa, Heterodera glycines
  unsure (1)..(143): unsure at all Xaa locations
MTFELPKLSYNYDALEPFVDTTTMNIHHTKHHQAYINNINNYIGGDKGAALKGKSILEVVQSATEAPVRNNGGGHYNHTLFWTFMTKPGSTNTAPHGALKERIEKEFGSLDAMKEKFNAAASTRFGXGWAWLXVKADGTLXIT

SEQ ID NO: 161961 - protein, 57 aa, Heterodera glycines
PPSRAHIRILTGMRAGSRLQSVGHRRRMEKERRSVWLLISIVLLFFLCDTGGVIIRF

SEQ ID NO: 161962 - protein, 80 aa, Heterodera glycines
  unsure (1)..(80): unsure at all Xaa locations
GRLLGAVLFLTFVAPGVILLXLLHARLSFLSSMRTFICPLRKEDVYGLLANTRDLSHWLQRFFLQLRRHNINLFTRCSGV

SEQ ID NO: 161963 - protein, 128 aa, Heterodera glycines
  unsure (1)..(128): unsure at all Xaa locations
IHRWEENNGVRTTRTEWKRKSLTKIPVSKCKLKIEAGEELDQFFKLTDXEGKLIRSNFRQNPYKFVLGHGHAIPPMDNAMLRMCVGEQRPVTIPAETFAENQRARGWARTKPCITLWSLKSIFHALPR

SEQ ID NO: 161964 - protein, 86 aa, Heterodera glycines
FRRLKHADNLNLNWVHYNGRFLKRLGRKRRTERSKIGKVWCFLFRCTHPATTDHHHNHRHFNNFRSSLLAATPAKGQQQKQNQQHN

SEQ ID NO: 161965 - protein, 43 aa, Heterodera glycines
GRQGGSPGQPGDPGGDGEQGQPGAQGSSGQCYHCPPPRTAPGY

SEQ ID NO: 161966 - protein, 35 aa, Heterodera glycines
IDISGIYRPPEFFGNGTVIGPQVFNARFTLQVLGG

SEQ ID NO: 161967 - protein, 64 aa, Heterodera glycines
VLKCLGCFGIKPQPSSIPAPPDDPNRNPPTPADEKQQKIGAQSAYTFDSTALERAAQAAKTLEK

SEQ ID NO: 161968 - protein, 154 aa, Heterodera glycines
  unsure (1)..(154): unsure at all Xaa locations
GRQNCEKCRVKRADLMSKTRPLSKADKLRGRQNRLLAQSHPDFLEERRSKRKQYLDEGFEPTFFDDAAEEGEAQNGAALTNGATGAGKKASSRRKRGTAEEQADALFRNIQGDQLDNLTTDDEEEEGAXMADEEEEGRCSXGGGGRRGLGQDAE

SEQ ID NO: 161969 - protein, 157 aa, Heterodera glycines
  unsure (1)..(157): unsure at all Xaa locations
AAKLKLIQNGLRRAGRAYRFVGYSTVCFSIISLLSGCFTLPMLKSYVSNVGLKMDSELSSCQSNAKDIWSXVSQLKGLPLIVSGNRTARQVCGGSGGYGSCQDCGSGGGPGPAGPPGQPGRPGNPGAPGSPGQPGHSVQTPCEQVRPPPCTPCPGGE

SEQ ID NO: 161970 - protein, 48 aa, Heterodera glycines
TKFCQIKNTLRIVRSAFWKCQNDRENGERRKDSSLVDHQWGCFSNSRW

SEQ ID NO: 161971 - protein, 96 aa, Heterodera glycines
  unsure (1)..(96): unsure at all Xaa locations
MDALKRLASRARQKSAEIILSAEKTEXGAELEQLRTKTDKTEEHMKKLVHAIEVYLQPNPAVRALDPRKDKSGRQNTLDGLGEAMKEAASKAVGAE

SEQ ID NO: 161972 - protein, 57 aa, Heterodera glycines
HIRLGGPLSLLNSFDFFIGLANGQKNRRQQKLNKQCQMEKLNESHLAEKGPPSINKY

SEQ ID NO: 161973 - protein, 59 aa, Heterodera glycines
PSFFFSFPLLFLSFVITLLLIFTSTNSAAPSDTLRLKRGYGGYNPGGNGGGWGGNGGGG

SEQ ID NO: 161974 - protein, 54 aa, Heterodera glycines
GRAPEKWLFYIIVEERNHANLMEKLEDYAKIEKFIMDHYNSGNEILNEAEIPQN

SEQ ID NO: 161975 - protein, 88 aa, Heterodera glycines
AAKYALIKWCFRVCIYSLSVSPFLSLSPLRFLVILLVAVLRRPFVLKWVNRPQQKWTPHAFDGFRRRAVHIVQQRVVQVQFAQRKLHI

SEQ ID NO: 161976 - protein, 69 aa, Heterodera glycines
QVFFFFFFFFSVPVCLLKSRRKVRPLSLRNSPFGCLQCGQRTFISFRHIVLQKARFAFHFLQLVSAWRP

SEQ ID NO: 161977 - protein, 67 aa, Heterodera glycines
PPSTRALGEIWKRNEGIGMRLMIAEALTMRRKRELMLNARQKFMMMTKFLLYLTSPINFYIGNRFTN

SEQ ID NO: 161978 - protein, 106 aa, Heterodera glycines
PPSFYCARQIDTSREVFGYQQTQFNYGAYASANGQQQSFINYAQQQNNSATAPVAGNATTNAYAASQYSLAASAYAQYSQAATQQQSVAATYGVQPPPPPPDYSAS

SEQ ID NO: 161979 - protein, 141 aa, Heterodera glycines
MQEKAFSVRSQEGVLQQQGTAQNGNKEEEAKRQAEQQEMAKNSILTQIIDEEGMSRLSNLRAAKPEKARAVEGMLIEMARSGRIRGRMSDSELRTLLDRVSAAGGTKSTKVKYDRRRAAIDSDEELDKMDEKGASSTDDDD

SEQ ID NO: 161980 - protein, 114 aa, Heterodera glycines
KRRGRARPRRSRRGYRRPENPHTPIEYGGTLRNIELPTTFETFDVLPPELPNETLQPLGEIPTFGMLDLNIFLPPRPTERPPAATNGTAGANVRRQRHRRRRTSTTIRHLRMRP

SEQ ID NO: 161981 - protein, 64 aa, Heterodera glycines
MGFHSTKMEADLSKEQQGKREADSMRMLAFFGVCLSTVATMICVVSVPGAYEHFQQVGAKMQGE

SEQ ID NO: 161982 - protein, 157 aa, Heterodera glycines
GRQLNLFKWTSTGAGEAYRFVAYSTVSFSIISLLSVCFTLPMLKSYVSNVGLKMDSELSSCQSNAKDIWSEVSQLKGLPLIVSGNRTARQVYGGSGGYGSCQDCCSGGGPGPAGPPGQPGRPGNPGAPGSPGQPGHSVQTPCEQVHPPPCTPCPGGQ

SEQ ID NO: 161983 - protein, 125 aa, Heterodera glycines
PPSLPKVFYVVFETSMGAMSIELYWQHAPRTCMNFQELARKGYYNNTIFHRIIADFMVQGGDPTRTGRGGTSIYGSRFADEISDDLRHTGAGIISMANSGPNTNGSQFFITLGPTQHLDGKHTIF

SEQ ID NO: 161984 - protein, 165 aa, Heterodera glycines
EDGTRLGVEHLVALGHQQIALLAGPLSSVSARLRLAGWHKYLTRNQIQPIAEREGDWSAMSGFQQTMQMLNEGIVPTAMLVANDQMALGAMRAITESGLRVGADISVVGYDDTEDSSCYIPPLTTIKQDFRLLGQTSVDRLLQLSQGQAVKGNQLLPVSLVKEKP

SEQ ID NO: 161985 - protein, 35 aa, Heterodera glycines
CFCDCCSCCCCCCSFCCCIVATARRFNTNFSRAFS

SEQ ID NO: 161986 - protein, 90 aa, Heterodera glycines
  unsure (1)..(90): unsure at all Xaa locations
AAKHYSSYIPRSLCCCKCLXKFFGLLFFLLLVDCATILFWFFFGHVKKRRRPHKNEIFICGDCWLLVFDFLAPSQLGLEIALVNRRFNCI

SEQ ID NO: 161987 - protein, 114 aa, Heterodera glycines
KRRGRARPRRSRRGHRRPENPHTPIEYGGTVRNIELPSTFETLDVLPPPPPNETLQPLGEIPTFGMLDLNIFLPRRPTERPPAATNGTAGAKVTTTTTPATTNVNNNTAPENAA

SEQ ID NO: 161988 - protein, 85 aa, Heterodera glycines
HEQTADEKMEKPNSSANVSFSNVTDKFRAHPVEKVGSPITINQSISDPTTELTEEDIFRMKSMSIEQNGWKNGPCASELQSAVSQ

SEQ ID NO: 161989 - protein, 116 aa, Heterodera glycines
IKWLGRKLSHLLSEVLVLAALGLFVTLRLTGFDANFTFLSNGSLVAAVGFCGILFNSDKLAGSELFPTGVRNLSCSFGQICSRIGVVGAPMLFFLDVCDHRYCSVFPHFTMIALAL

SEQ ID NO: 161990 - protein, 85 aa, Heterodera glycines
TWIDFSTLHSFPILNNRFFFSSFFCQRVGIIIAHTGNNAILLVHEHICCSAQRCVCCVRFLRRRFRLWRPRLLLWRLLLYCCLRP

SEQ ID NO: 161991 - protein, 135 aa, Heterodera glycines
MNWFEPRVLRSARPFVPSGGERRDEVGKTGDDQAVVQMMCDLVLGEIQAEISRVEKEMERRRQDERRLTNQPDYSWLMDWRLRAKRPLSFRESSEVELLCSKVRAEEWRRLLKEWHIKVRFAESRDEVLDTFRAL

SEQ ID NO: 161992 - protein, 49 aa, Heterodera glycines
MGENDERKSEGLMVRRSKGRASVSPRPASLASQKATRLALSTQRFSWRP

SEQ ID NO: 161993 - protein, 48 aa, Heterodera glycines
MIPGRRMLEHVRSGSGAPCTESAASEAATAMYEMLDSMILEELAYSGG

SEQ ID NO: 161994 - protein, 34 aa, Heterodera glycines
KFFFFFFFFFFFFFFFNSFHVSLMTKKQATTTEK

SEQ ID NO: 161995 - protein, 82 aa, Heterodera glycines
PPSADGATVTNANEPVATTTTTAATTNTEATAPTTTTTTADGAAATNTDATGAATTPTTNAATNTEAPAATTPATTADVALD

SEQ ID NO: 161996 - protein, 37 aa, Heterodera glycines
GRNGERHETRHGQRQQSGRKEHLETLCNLNERKQLPP

SEQ ID NO: 161997 - protein, 110 aa, Heterodera glycines
  unsure (1)..(110): unsure at all Xaa locations
PPRVDHPIHPFGSEGFRVNTDSAWTELMEVQISVTPPTRPRENPFNSIFLRQKRQGLPPQCVCQLRQPSCAPGPPGPPGPPGTPGEPGGAGQPGSPXQPGQQAPPCPPPV

SEQ ID NO: 161998 - protein, 58 aa, Heterodera glycines
GRKASIAEQIERICRWGEFDELTALCEGLAIVQTFDEAQKLLVECAIKKDFADGKAGF

SEQ ID NO: 161999 - protein, 57 aa, Heterodera glycines
YLLIYFWAFSAKCDSFSFSIWHCLFSFCWRLFFWPLAKPMKKSNEFKRERGPPRRIW

SEQ ID NO: 162000 - protein, 131 aa, Heterodera glycines
  unsure (1)..(131): unsure at all Xaa locations
AAKEWVLKVDDDIAGHVXRMVEWTEKKFGKMASEHPLIYFGVPGDRGLSRDKNSKWCVPYEMCPGEHFPPCLCGGGYLTTPSTIKAVLEQAHKTNSFYLEDVLAVHGHFGRVGQCDRIGPIEPFLWEWIAV

SEQ ID NO: 162001 - protein, 62 aa, Heterodera glycines
ANLKMKFTLLSILFLALVHIGISGKYDKSDEHDGKYGARPPASGGYHHDNNNYGGGNHYGGG

SEQ ID NO: 162002 - protein, 36 aa, Heterodera glycines
QVFFFFFFFFFCASSSYVRPHCPSRCDVSCDSSLRP

SEQ ID NO: 162003 - protein, 51 aa, Heterodera glycines
RSATARARRLLLQRLFLLARRLRTSSSTTGGRATTPRPSLLRRATRTTWRP

SEQ ID NO: 162004 - protein, 78 aa, Heterodera glycines
AAKVGGANYFLILFKMVRGLINKSRDEQIEQQNARIAEQQQVIRECKTLFRHVSAHSNTISSALLMFTEDHPEFAANC

SEQ ID NO: 162005 - protein, 118 aa, Heterodera glycines
METKRNNYNNIDSLWSTLCDLGYQTSQGLAYSVGMPNFSFGAFILLSVMTWCCFFMPPVAVFFRGYLRDGNACTEHVIYNIILCFFLWVPGMGHAFWYCFSDMFSGPKKEGAGYSKNA

SEQ ID NO: 162006 - protein, 61 aa, Heterodera glycines
RPFAEGLSIEEIFFNCTFHQQFLCLVKCLDDGQPLTECRLFVEFTPQTKSFNCLSILMLCG

SEQ ID NO: 162007 - protein, 55 aa, Heterodera glycines
MGNTRSGSSSSAMTNCPQTIGGSAGKFTSKFDVFPYATAEVLLLLCSEVLSCCAA

SEQ ID NO: 162008 - protein, 72 aa, Heterodera glycines
  unsure (1)..(72): unsure at all Xaa locations
FIFLRMGHLFSYFKSLFGHREMRILILGLDGAGKTTILHRLQVGEVVTTIPTXGFNVEQLPQKLKFQVWIGR

SEQ ID NO: 162009 - protein, 73 aa, Heterodera glycines
  unsure (1)..(73): unsure at all Xaa locations
FIFLRMGHPFSYFKSLFGHREMRILILGLHGAGKTPILHRLQVGEVVTTIPTXGFNVEQPPQKLKFQVWDLGG

SEQ ID NO: 162010 - protein, 143 aa, Heterodera glycines
  unsure (1)..(143): unsure at all Xaa locations
PXHPVQAPSPPPPXEHLPPPLHPPFXLPPPPHHPSSNCPIGPLECCGRVRPPAPPPCRASAATTPFCRRRWRRWSVPLRFAPRPPPPRRQKMLAQPLRPSTASAYCAAPPKSRDGFARAADFACPATCPPCSGAWFFPLNLRV

SEQ ID NO: 162011 - protein, 107 aa, Heterodera glycines
  unsure (1)..(107): unsure at all Xaa locations
MGTHVGNVLSPFRQWERELDHFFXGMQPMRRDHVAQLNVSDKGDLTYKGDVSGFRPEEINVEVIGDEIIVNGEHREQNDSESVHRQFSRRVRHPGGGPKGEHQVRAG

SEQ ID NO: 162012 - protein, 100 aa, Heterodera glycines
STPSFAAFFSVLISAWGKAQTDAEQVEDGHTKLPARTISIACACRTTAAPVFKLSSSTTADRSFSFEFQHISSLGRAEGERSQKQAAENARKKLGPHFVN

SEQ ID NO: 162013 - protein, 164 aa, Heterodera glycines
  unsure (1)..(164): unsure at all Xaa locations
RGAAIALEEGLIDVTRTDSESKPIWDDAIPLNHVVVVRRSRVKLRSGVPTGNVSSIESANSNSLFLYYSYRRNAYAWGIRECVIKFETNTDVEKWXTLLGNALTAQKHRPKRLWGCINPFGGEGDAISIWEKEVEPIFKLGNIQYEVRKTERGDHALEIVREFS

SEQ ID NO: 162014 - protein, 68 aa, Heterodera glycines
VHTLSRRRVNIYQAEHVHVRVAFLSLQFIVFSSFDCEIEQNQLNSEETEEEGAAHFNSKIELDFHLAA

SEQ ID NO: 162015 - protein, 68 aa, Heterodera glycines
  unsure (1)..(68): unsure at all Xaa locations
GRQEPGQPGENGQPGQPGNPGXEGYPGDGGSPGQPGNPGGSGEPGQPGAQGSSGQCYHCPPPRTAPGY

SEQ ID NO: 162016 - protein, 74 aa, Heterodera glycines
AAKGEDAQYCPCPPRTQGVDKQPTYETGASVPVAKPYETKPYEVPKQQTTYDVKAAVAPGGYESLGGVKAAAAP

SEQ ID NO: 162017 - protein, 76 aa, Heterodera glycines
  unsure (1)..(76): unsure at all Xaa locations
QIPXGGPLSLPHSFDFFIGLPHAQKHRPPQKLHKQPQMEKLNESHLSRESPKINSQISAPLPPPLXKGREESNSRP

SEQ ID NO: 162018 - protein, 56 aa, Heterodera glycines
PRRDPGLATDVQRLVVEEHCLAVPRRRRRLGRGDETNGGSPPRRMGFQKLGRSWRP

SEQ ID NO: 162019 - protein, 45 aa, Heterodera glycines
VHILSRRRVNIYQAEHVHVRVAFLSLQFIVLSSFDCEIEQNQPGG

SEQ ID NO: 162020 - protein, 46 aa, Heterodera glycines
VHILSRRRVNIHQPEHVHVRVAFLSLQFIVLSSFDCEIEQNQPRRP

SEQ ID NO: 162021 - protein, 88 aa, Heterodera glycines
KTPQRTSPNVKQWPTRTVANRFSDNSFGRTARRHCQSRYTQLTGEAPRKGTASEAQREMRSDGREGPFFNSKPHLRENWKSFFFFLAA

SEQ ID NO: 162022 - protein, 118 aa, Heterodera glycines
PPCWSIRSRSLGCTLNTWPPMLSWPDLASICLNRSVSSSGLRLSFEETASTLHPGPWQSGEIHVHPFSGHCTSAYSVAFVQLFTTPQQQQFVVAPGGTVLRNRAFSPFGSWDAERLAA

SEQ ID NO: 162023 - protein, 126 aa, Heterodera glycines
PPSLPQSLLTLCCETSMGAMSIELYWQHAPRTCMNFQELARKGDYNNTIFHRIIADFMVQGGDPTRTGRGGTSIYGGRFADEISDDLRHTGAGIISMANSGPNTNGSQFFITLGPTQHLDGEHTIF

SEQ ID NO: 162024 - protein, 66 aa, Heterodera glycines
TSLAPPHQICHHLECRHTISHPMICRATTEGNEQSALEVMRRHVDQCHRRPVQRFPLLILWVQSPW

SEQ ID NO: 162025 - protein, 58 aa, Heterodera glycines
PISPRKCSAPKAGVIAPEPTASAMPAASRPFIKAPSLGKQLPNTLHALTPTRCRKDQT

SEQ ID NO: 162026 - protein, 141 aa, Heterodera glycines
KRNAQKAAENRENVGTSSRLIVKNLPCGKKTRWDEAKVRARFSKFGTLTDVRLKLSEKTGACKFAFVGFSSAEHCQNAIKALDGAYIGGSKLTVEECEALTTDRTAITKQLSLNKRKKLRRKGECEVDEEEDKEEAAEEAD

SEQ ID NO: 162027 - protein, 62 aa, Heterodera glycines
MADTPPPPPPPPPAAAAAAGGGDEAVDLEQRVRQLIMCIGLGNEDAVREISILIESFNREQF

SEQ ID NO: 162028 - protein, 85 aa, Heterodera glycines
MARRSNATGTRKPHRHRPGTVPRREIRRYQSTTELLLRKLPFNRLVREIAQHNNLEMRFQAVAFAALQEASAAYWFDFWRTPIWR

SEQ ID NO: 162029 - protein, 86 aa, Heterodera glycines
MKLRTLMLGAALALTAVTGMAQADTAPVVTPYHYGEKMDVQKVLAMHEPDTNVCKVINADIKFVDSQGKVQDVGYRKLSEACDWEN

SEQ ID NO: 162030 - protein, 238 aa, Heterodera glycines
PRIAFLAALSHRDACVIASTDEQKQMANTVRDEFSKMDYSDHLMLIRASNAFSRVNGSCREQWCGARLISESAMRMICGIRHQLFIELRRLHLLPSRMTNPDDNMNNLNLFASSWPMVQGCIVAGAYPNIGFVRFGSKLNRIRTMGSKNCVLHPSSCLRRQTANPSKRSAKLNEVFSQKGSEPMLQYLIYQELVGDTHQQHMVPTVTAVTSLHILLFAGPVRMDLKCVKYFELVDPHG

SEQ ID NO: 162031 - protein, 50 aa, Heterodera glycines
PRSWLLPSWALLCRLRSSVSPCTSSRSRFRPEGCSADEKVRSHCVVVGRT

SEQ ID NO: 162032 - protein, 86 aa, Heterodera glycines
MARRSNATGTRKPHRYRPGTVARREIRRYQSTTELLLRKLPFNRLVREIAQDNNLEMRFQAVAFAALQEASEAYLVRLLENTNLAA

SEQ ID NO: 162033 - protein, 59 aa, Heterodera glycines
MPVVKPQTDSEFTKFLLNVGTAPCIVDFFATWCQPCSAIAPVFDELSNNYLNLKFVKVD

SEQ ID NO: 162034 - protein, 43 aa, Heterodera glycines
QLLSGGSRGGGGDNVCHNCNKPGHFSRECPPGRTGGGEAAARV

SEQ ID NO: 162035 - protein, 123 aa, Heterodera glycines
YSECSMRATALFNECEPFSSSASRSRGAIVFFFRSELLLSLPNSSSSRSPASVPTPLLMVLLLSSICPLQMCRCFRPVPFCMVNAWKNGCNSWYEVNVLMLNSEAERISMSAPVNSVYLLLGG

SEQ ID NO: 162036 - protein, 75 aa, Heterodera glycines
PPSGPSGPPGQPGQGGENGQPGQPGNPGPQGYPGDGGSPGQPGNPGGNGEQGQAGAQGSSGQCYHCAPPRTAPGY

SEQ ID NO: 162037 - protein, 54 aa, Heterodera glycines
  unsure (1)..(54): unsure at all Xaa locations
KFFLSAFVCVLFMGXKHTHSTKPGRRNEEKNVLTTIIVLALFQVRTHGRLSGGG

SEQ ID NO: 162038 - protein, 72 aa, Heterodera glycines
  unsure (1)..(72): unsure at all Xaa locations
LITSFQLMITFGLVAAHIFAFAFSYIDPLNWGWRLMVGFAAIPSVVQFVXWFLPESPRWLYENKSHKECRRC

SEQ ID NO: 162039 - protein, 46 aa, Heterodera glycines
EIGLVLLGNCCSKCKARGTPNFHLNAKRRPLPRLSNCLVTTAKLGG

SEQ ID NO: 162040 - protein, 68 aa, Heterodera glycines
PQRFEEKMLALVLAVLSSFLHCLFWKLMVVIGVGKRTRTVTRAERKSTQKKRIRSRTSQANADREGRL

SEQ ID NO: 162041 - protein, 185 aa, Heterodera glycines
RPRHAFCNRLWVSPWWHHRRHSRRLIRSFFVVFVDLLAHFWVRNQHIAQLFHQFHQFTRCPHSFSGFVHPKVILSERLNSVRFEQLFQPLPRRQRHSESVLHSVQAVQADLVTVLPLLSPGSENSHVPSVDGIKKCPGHFIGQLRTGERQSSAGQNKRNWQRKEKEGEKRGGQPRHTQEKERTPT

SEQ ID NO: 162042 - protein, 40 aa, Heterodera glycines
GRQDSFPHRSNLHPGVPMVRATTARTRASAARARSIKTNR

SEQ ID NO: 162043 - protein, 46 aa, Heterodera glycines
NADKTAKATTRSLALTFWHGYSASSESKAWHTLTSEEGKRNKAWRP

SEQ ID NO: 162044 - protein, 69 aa, Heterodera glycines
PRTIGQCRRAVTEFMHFVIEAKALRKVFISIKGVYYQAEILGERVTWVVGHERAVGRANELDFSVMANF

SEQ ID NO: 162045 - protein, 47 aa, Heterodera glycines
IISINSHIFHCLQSDLTRLRRNFTPMEIQRDSHLRSMKELLSTMDPQ

SEQ ID NO: 162046 - protein, 56 aa, Heterodera glycines
PPSFHIHHKMELRLLFASLFALWAVTAAMRKQGVAISGKFVCGHAPAMSNSTKVRI

SEQ ID NO: 162047 - protein, 43 aa, Heterodera glycines
PIYLSPLAHRQLAAQKHRGHACNNLGRNIASKESRSGANPLGG

SEQ ID NO: 162048 - protein, 57 aa, Heterodera glycines
EMAKSKNHTSHNQNRKDHRNGIHKPKKERYMSMKGVDPKFLRNLRFAKKHNKRNVKA

SEQ ID NO: 162049 - protein, 49 aa, Heterodera glycines
FVLIGPLKAYMLMYRQIDHSQNEHFVRSTELPEHLILLKDKLEAEEEER

SEQ ID NO: 162050 - protein, 82 aa, Heterodera glycines
ILANSFFDHADDPKFASSFLCCAIVFHFSGQNFPFRHGSVNGHRTAGSFLCECTWGKEKNNGEKSKRQKKEEAHFYLKPWRP

SEQ ID NO: 162051 - protein, 63 aa, Heterodera glycines
IYHSSMPYSMFFSGGQAVHYSSDFARRGYYGCSHGCVNIRSWSKIAWIYQRVHVGDKVVVYRS

SEQ ID NO: 162052 - protein, 48 aa, Heterodera glycines
DSQSVFTSAVLFYCFSSSFCWSTAAFFFISMGMVRPPCQPFSFRSWRP

SEQ ID NO: 162053 - protein, 42 aa, Heterodera glycines
ERLSRIRAFMEALEKYRQKQMDSLHETYSRRVSAIRDNYHSQ

SEQ ID NO: 162054 - protein, 42 aa, Heterodera glycines
GRQEDLRTRRFFQAGTPEIVTCVSAMFLSGQLAVCQGRKSNW

SEQ ID NO: 162055 - protein, 73 aa, Heterodera glycines
LFLGLCVVLIALTVATANIDLTVPYVYAAVALFRFMLALFIGFSFWYGFIGLTIEMKALKETKYSIKKLLRSL

SEQ ID NO: 162056 - protein, 69 aa, Heterodera glycines
AALNDASRDQPFQSRVLLQVHDELVVEIAPGELEQVQAIVEEEMPRAITLRVPLEVSAGTGTNWDEAAH

SEQ ID NO: 162057 - protein, 56 aa, Heterodera glycines; identical to SEQ ID NO: 162046

SEQ ID NO: 162058 - protein, 99 aa, Heterodera glycines
GRQDSDHASLKRELKSLLKKLRKQKCLDELKKAIIAEGKYVKCVVYKIPEKQQTPYGGQMKSFPHFICCKICRFPDLLTHHQLRPVAQCLHPFNKAQKM

SEQ ID NO: 162059 - protein, 88 aa, Heterodera glycines; identical to SEQ ID NO: 161855

SEQ ID NO: 162060 - protein, 89 aa, Heterodera glycines
IFNQMACSVRLDHHILLPSHFFPKFPPHGPPPPIPPPYGEPYIPRLARRAAGSLSTLSSCAVISAEKAHKTTKRKAMIKRRGDILSFAA

SEQ ID NO: 162061 - protein, 65 aa, Heterodera glycines
QVFFFSTNNNNSMSDNRGASAASTGTTNSQESQVASPVKAGKATTKTTASGKGGKAKANGKVKAA

SEQ ID NO: 162062 - protein, 127 aa, Heterodera glycines
MLIREYRIVMPFAIEEYQIGQLFSVTEASRQETGGGEGVQMVRNEPFEGQSLFNGRFTSGQFTHKIIHLDTKVPALLRAIMPRGSTTLHERSWNAFPYCKTEVTNPDYMKDNFLIRIETMHLSDRGT

SEQ ID NO: 162063 - protein, 45 aa, Heterodera glycines
IFFLKGMTIKKKTLDWKALICVAVIGFPKPLYKGVICQCFNQRHN

SEQ ID NO: 162064 - protein, 69 aa, Heterodera glycines
PPHKSKLSKMDERTRLAHIRLVDTMEHNVKHAEELKADNANNENKALGELRKRQKSGKIRDGRHMEGMP

SEQ ID NO: 162065 - protein, 124 aa, Heterodera glycines
PPRFDAFSKLFLLLPILLLHLQQSQACFSRGNSGEPSDGNPEAQGLKSENDVRTVQLKKEKQTDETEEEKDEESSAEQKLPSELDPEFVKTYLREFGHLKHNENGLSHGVKHFQRFLGYRQTGN

SEQ ID NO: 162066 - protein, 218 aa, Heterodera glycines
MSRPTPSELTVEMLKKRISGGRMDLSSLRLNKVPIELMCRSLAGQRITCVDLSDNLLTSFSAQFLQFFPDIQELDLHSNKIKRLPENFGVLSSLRRLDLSENQIKKLPISFAELDNLRWLNLVNNPLENDLAEVIGSCSNDEECSFAAKSAVQYVQFFSTVSSESTAIADTAFLQNETSSTSNNSDNINVSALRQADNAKNGKGFGSPNAKPQQKQIP

SEQ ID NO: 162067 - protein, 82 aa, Heterodera glycines
GRQQTLQNELNREKDHHMKVMVNAQKQVGELSQELEKALVAYGNLAKQQSNDSAKCVELNARNQKMGEEISQLKNEAKCASE

SEQ ID NO: 162068 - protein, 56 aa, Heterodera glycines; identical to SEQ ID NO: 161876

SEQ ID NO: 162069 - protein, 70 aa, Heterodera glycines
AARINWKSNSIFEYKMNCSFFLCLFTVQLILLNFAVEGREDDELKRKKRNTDVDVLGLVNIHAPSRKNVN

SEQ ID NO: 162070 - protein, 83 aa, Heterodera glycines
MDALKKLASRARQRSAEIMLNAEKTEIGAELEALLTKTDKTEEDMKKLVHAIEVYLQPNSAVRALDGLGEAMKGAASRVVGAE

SEQ ID NO: 162071 - protein, 107 aa, Heterodera glycines
LATIVVCIVGLSLIGSICIIWCHALSEFCLNRTDISSSSARKMFALCTIIGTRNTRTSRAQVLQRMPIEANKWEDLGQGGEAEDEDDDEQYCISEYVFFPFLFSWRP

SEQ ID NO: 162072 - protein, 80 aa, Heterodera glycines
MLSSSACCTLLAALISAAFFAMANAQTVKQCLCSEIQPCSEKYMNTWKTCMQQCKGHFSSVGGDVEKLGHCLDSNQALLQ

SEQ ID NO: 162073 - protein, 124 aa, Heterodera glycines
MSTSEVKPEDKSMDETSKNELRAEDTSIKDKGIGSVKETETNGAITTDNEPKIHAEKNETGDAAVGQKSTEEQFDKTDKKAEQQNVLDVNKTQQEPKAPLDEVKETPQGDNSEEVPTEAIVVDV

SEQ ID NO: 162074 - protein, 241 aa, Heterodera glycines
PPSEMWRKRTPAKARETNYPLDNAQCASPQHFSAGPMHPFQPWQNIDGLVNKYTDNMYEFAPRPSCSMGPDCGSKYLFCDRSHGKPRCAAKVRPNGNCAGFTNGEDVCLNGECQYGKCVKKSPPPTTPKPPPIVTVSPIESPCFNEHECCAKWAADGQCESNSEYMSQFCKASCKKCQYSYNMQEECADRHKNCKALSYQMKCDSSWMAENCRKYCNKCNVKRMQTCAGGSPGGRKTHAFI

SEQ ID NO: 162075 - protein, 81 aa, Heterodera glycines
MIDCHCHLADESFNEDISQVIDRAKQNGVKAALVVAEFKDDFERILELTHQFPDFLFPCLGMHPVQRGHISCSEEMYKNFE

SEQ ID NO: 162076 - protein, 157 aa, Heterodera glycines
  unsure (1)..(157): unsure at all Xaa locations
RCSSPCWFAPQVERRTSLSRSTSDRDASTASIRFPPGNFKHSLTLFSKSFSSFPRGTCSLSVSRPYLALDGIYHPIRAAFPNNPTRRQRLVVRQGPGPTGLSPSQAPPSKGLGPGXAAEDASTDYNSGDAAARFSCWALPGSLAATRGILVSFFSSA

SEQ ID NO: 162077 - protein, 46 aa, Heterodera glycines
IVQLFASICPLVCGQMLRCTNCTCGKPIFGIRFYIAGNSEGFAWRP

SEQ ID NO: 162078 - protein, 73 aa, Heterodera glycines
PPRVYDRMIAFLLDNKNSAKICEELKLRRIDTTNLWDVLFDMIILDAFEDMQKLPSAVTALLRNGFISTSMKQ

SEQ ID NO: 162079 - protein, 47 aa, Heterodera glycines
MDFDGRIKAYRFVAYSTVSFSIISLLSVCFTLPMLKSYVSNVGLKMD

SEQ ID NO: 162080 - protein, 58 aa, Heterodera glycines
PPRPGQPGNPGPQGYPGDGGSPGQPGNPGGSGEPGQPGAQGSSGQCYHCPPPRTAPGY

SEQ ID NO: 162081 - protein, 65 aa, Heterodera glycines
GSLSQFPPAAVAAVCCGVTVVMFVNNAVNVVPLVSSWRTLRDNDGTLGDLHSTSDISASSKNWRP

SEQ ID NO: 162082 - protein, 64 aa, Heterodera glycines
MGFHSTKMEADLSKEQQGKREADSMRMLAFFGVCLSTVATMICVVSVPVAYEHFQQVGTKMQGE

SEQ ID NO: 162083 - protein, 41 aa, Heterodera glycines
GRQGPCFVRRIMRALGAFIGMRCDRLKPHFEPIQLTNWLRS

SEQ ID NO: 162084 - protein, 47 aa, Heterodera glycines
IDNWRRTPTDDPRGCCPFVSHHFPDHFGIYKTLIGQFSMLFLIFRRP

SEQ ID NO: 162085 - protein, 73 aa, Heterodera glycines
AAKLNSGSMSSWWSLLDQLKISYVNWSITDKSEACAALTGGTSAANVGTSSRWTQSGNMVASQHKKKSTGVKC

SEQ ID NO: 162086 - protein, 70 aa, Heterodera glycines
YSLVPSSDPILFLICSKYKMAYLELVMALIKTLTMTPLYRGLGNPITATQIKAFQSSVFFFIVIPFRKNI

SEQ ID NO: 162087 - protein, 128 aa, Heterodera glycines
CTRRTMLHSIIYFVFHYLSTIRGGFPLCLECCFTTARDSHTKGGGGGTERRASLGLAMAMAMAMALVGLRMGLERRVTQHVSSTLSALCVQCLFFSTGVIAVVLALLCVCCCVVPDAARVIHVVRRSS

SEQ ID NO: 162088 - protein, 259 aa, Heterodera glycines
  unsure (1)..(259): unsure at all Xaa locations
PVTLYDVAEYAGVSYQTFXRVVNQASHVSAKTREKVEAAMAELNYIPNRVAQQLAGKQSLLIGVATSSLALHAPSQIVAAIKSRADQLGASVVVSMVERSGVEACKAAVHNLLAQRVSGLIINYPLDDQDAIAVEAACTNVPALFLDVSDQTPINSIIFSHEDGTRLGVEHLVALGHQQIALLAGPLSSVSARLRLAGWHKYLTRNQIQPIAEREGDWSAMSGFQQTMQMLNEGIVPTAMLVANDQMALGAMRAITESG

SEQ ID NO: 162089 - protein, 91 aa, Heterodera glycines
MFGYQQTQFNYGAYASANGQQQSFINYAQQQNNSATAPVAGNATTNAYAASQYSLAASAYAQYSQAATQQQSVAATYGVQPPPPPPDYSAS

SEQ ID NO: 162090 - protein, 53 aa, Heterodera glycines
MADGLMTLAPGTRVSGRWIIIKKLGAGSFGAVYLCQDERVGTIAALKTEPFNT

SEQ ID NO: 162091 - protein, 124 aa, Heterodera glycines
  unsure (1)..(124): unsure at all Xaa locations
PPRFDAFYKLFLLLPILLLXLQQSQACFSRGNSGEPSDGNPEAQGLKSENDVRTVQLKKEKQTDETEEEKDEESSAEQKLPSELDPEFVKTYLREFGHLKHNENGLSHGVKHFQRFLGYRQTGN

SEQ ID NO: 162092 - protein, 100 aa, Heterodera glycines
STPSFAAFFSVLISAWGKAQTDAEQVEDGHTKLPARTISIACACRTTAAPVFKLSSSTTADRSFSFEFQHISSLGRAEGERSQKQAAENDRKKLGNHFLN

SEQ ID NO: 162093 - protein, 122 aa, Heterodera glycines
MVLLGAIDQGTSSSRFLVFDSENGNLVAGHQLEVQQQFPNPGFVEMCPEQIFKTTVRCIKSTCEELNRRGIDPKKEIKAIGITNQRETTIVWDRETGCHLSNAIVWLDCRTHELCDEYIQRT

SEQ ID NO: 162094 - protein, 53 aa, Heterodera glycines; identical to SEQ ID NO: 162090

SEQ ID NO: 162095 - protein, 57 aa, Heterodera glycines
YLLIYFWPFSAQMRLVQLLHLALLVQLLLAPVLLAVGQTDEKVKRIQKREGPPEANL

SEQ ID NO: 162096 - protein, 117 aa, Heterodera glycines
  unsure (1)..(117): unsure at all Xaa locations
TVKRPRCWSVPMXSGPLTSIQKSTLXVRGGETRQDSEDTXRFPLEAPSCALLFRPCRLPDACPPFSLPEAWRFVIHHAVCISVWCMAVAPSWAVCTNPPFSPTAAPYTGTMXLSPTR

SEQ ID NO: 162097 - protein, 233 aa, Heterodera glycines
  unsure (1)..(233): unsure at all Xaa locations
MSRDVSSAEKLPLLQSSNPRTYSRTSSREEARPIDHNDPLTGEEGEVQGGFVSYQHGDANPRTPMGQGQARNVNQNGSPSDVAEEDDEDSPLMNRGPMVVCRVCEAEIALDGKTTLHVVRCQNCNEVTPIRAAPPGKKYVRCPCNCLLVCKASSARIACPRQNCRRVITLAASSPVGTAVRAPAGTCRVQCAHCAEVIIFNTLSNTVAHCPHCXSVSSVGVRFARARSTLFCI

SEQ ID NO: 162098 - protein, 96 aa, Heterodera glycines
MRSLQKYHIIADNLGWFSDLDGKKNIEEILAAKGEAIKRGTAVLEMEVPAEEEGDNAKLIRWPQRWRWTKFEREVFSFLKFTYNYDPLLDIGRKVE

SEQ ID NO: 162099 - protein, 122 aa, Heterodera glycines
GRQAKSPIVVAGGGLVGLSVAYGLAKRGAKEVFLFERHCIGAHNSTRISTGMINNPCFYTDRSLQSVVRKSHELYAELDSRGTLGFTRCGRVYLASSDDTAIQARRMFSRLSADPANSAAEL

SEQ ID NO: 162100 - protein, 62 aa, Heterodera glycines
AAKVLTGTGKFPAFFPVFPAKKSRSRSCPNFPVPLHSSVYENGNPSIFRIEFLIAQIVNFTY

SEQ ID NO: 162101 - protein, 51 aa, Heterodera glycines
SSMDGFIASDCVVLSSVNYSLCFGGAEILLVGGDRLIRQMNEQLTKGRLIN

SEQ ID NO: 162102 - protein, 51 aa, Heterodera glycines
AARNRTICVSIIIPSLCNNNNTSKATSSPFLIVLSSVRSSHQFARRFRNGT

SEQ ID NO: 162103 - protein, 57 aa, Heterodera glycines; identical to SEQ ID NO: 162048

SEQ ID NO: 162104 - protein, 35 aa, Heterodera glycines
SPPPPPSPPPSASGRYPFGYLGQYAPLAALLNQFV

SEQ ID NO: 162105 - protein, 57 aa, Heterodera glycines
PPSGQPGNPGPQGYPGDGGSPGQPGNPGGSGEPGQPGAQGSSGQCYHCPPPRTAPGY

SEQ ID NO: 162106 - protein, 52 aa, Heterodera glycines
AAKGNPPPPPPSAPNRRSVVVGEEIIDGQTKCGSVRPAADPDKSNSRRGSGR

SEQ ID NO: 162107 - protein, 127 aa, Heterodera glycines
MTDPLQLCLRALVNLLSCAWIQREVMRDVRVPIEIANILYKIVLTRDSIQTHRICVELITTLVTKAAKDAVKAKEEKNELDEQNGNAVDLVNGHEEHRDTDFGQGQRRDFGMNDGVLSSSSSSDATL

SEQ ID NO: 162108 - protein, 38 aa, Heterodera glycines
KSFSCFVKSRNVTVRRTSTVRRAEKAKPFQRANFDLAA

SEQ ID NO: 162109 - protein, 112 aa, Heterodera glycines
MSAESPTTSQRRARSRKTKKRAVSAGETKPLRRSARIAAQKAAKEKAAKQKARDGSTASTKSAGRGRPSRSPKKSGPKSRRSPAGRGGGRSQTPRKKKQPMKKAPGPSSRTP

SEQ ID NO: 162110 - protein, 57 aa, Heterodera glycines; identical to SEQ ID NO: 162048

SEQ ID NO: 162111 - protein, 65 aa, Heterodera glycines
AARSSLSLFLLFSHSFPFSAFPCYFRPLLLLLLNCRFSYRPLSSASLLLLSLCSPLRRHSVPHRR

SEQ ID NO: 162112 - protein, 62 aa, Heterodera glycines
GRQGKGECERNQAYMSSWCKASCRQCDFDYDIDKECGNRHPNCWQWANEGQCQRNLFWMNEN

SEQ ID NO: 162113 - protein, 83 aa, Heterodera glycines
MDVDMWQLPYYHGLLPREDVVELLPNDGDFLVRMTEEISGTERVYALSVNVGGFLNHVIFRRHKGMFTVDLNSDKGFRTIERF

SEQ ID NO: 162114 - protein, 70 aa, Heterodera glycines
PPRINWKSNSIFEYKMNCSFFLCLFTVQLILLNFAVEGREDDELKRKKRNTDVDVLGLVNIHAPSRKNVN

SEQ ID NO: 162115 - protein, 48 aa, Heterodera glycines
AEGGEPLGTVGRLLHVIGDNQLPNNAEGNENKVHFNGGNQLKVFSSNL

SEQ ID NO: 162116 - protein, 103 aa, Heterodera glycines
AQISPGKHGGFEEVPVPTVAQPSYVLGFRGTIHFNGTLSDNALAFFRHALPPPTTLYRFSVLDEFYRANGLLSPFKTTERINIFLARQFAQRTVCGVGGASAG

SEQ ID NO: 162117 - protein, 73 aa, Heterodera glycines
PPRKNLLYLSLEMSWIFGIKPQPSSIPAPPDDPNRNPPTPADEKQQKIWGTGVPTHLTQLRWNGRHKQQKRWK

SEQ ID NO: 162118 - protein, 67 aa, Heterodera glycines
GRQASLRGFEPPPDVEVPSEPPVEWRAWLNKSRRFPPSEEEIQLNLLKQQAQLVQNTDTEKKAPMIV

SEQ ID NO: 162119 - protein, 130 aa, Heterodera glycines
AAEKEEKKSESKEAEKKENEEQKPAGKKEKRAAEKEEKKTESKEAEKKENEEQKPAGKKEKRAAEKEEKKSESKEAEKKENEEQKPAGKKEKRAAEKEEKKTESKEAEKKENEEQKPAGKKEKRAAEKEE

SEQ ID NO: 162120 - protein, 236 aa, Heterodera glycines
AALHESYQRAQWAFGEIFQDCVSGLAFLHVGDATRARSLYERSLESAVALHGQLSPFASMPALLLAEILYEQNDLDRARQLVADYLDVAHGLGYVDKLIAAYLVKARLEAGGGQIETAQRTLDEGDRCARVTGFARLHANISCERMRLLSANSAAVLDLARTAGLLGSCSALQPNVGVTSSTEKLAISWAYAARANGDIDGAIRLLKSWYRFVMARRCLRSGLRLAVELGTLFYLR

SEQ ID NO: 162121 - protein, 41 aa, Heterodera glycines
GRQKKALSLRSKFSVLKGDITKMTTDCIVNAANSSLLGGGG

SEQ ID NO: 162122 - protein, 62 aa, Heterodera glycines
ATCCATVAITSCLIIFPLIVHYIQTLEANVQLDLDFCKSRARDMFKEMFEIKTGGKGGEAAA

SEQ ID NO: 162123 - protein, 75 aa, Heterodera glycines
VKAVWPVIHQSSEFSSGYSQSRAHLSSSSIWLCRCERTCWPINACLFSLSTVPLSDNHGICGWPSHKAHRIFVRL

SEQ ID NO: 162124 - protein, 53 aa, Heterodera glycines; identical to SEQ ID NO: 162090

SEQ ID NO: 162125 - protein, 141 aa, Heterodera glycines; identical to SEQ ID NO: 161866

SEQ ID NO: 162126 - protein, 83 aa, Heterodera glycines
PLRPGPTVRGRFLLCRRWWRHTTRVRMEFFGSVLSLLLVVISPSFCSSAVCLFCLLRRIASSEAAANGGECANLKCAVAPWRP

SEQ ID NO: 162127 - protein, 52 aa, Heterodera glycines
FSTEEAQEQPTGRTNESKTIARRKKKTLATHSVAKRVPMSHSHLHLRFALRP

SEQ ID NO: 162128 - protein, 70 aa, Heterodera glycines
AAKNLQREQKVPVVHQPEAADLTGRTTGRWAVTRGVQRRGTSVGRPAKEKLTMHYFRHVLLFARSPFGTN

SEQ ID NO: 162129 - protein, 137 aa, Heterodera glycines
MENEGQLSPAEEQMLIEHAQIVQRNSTSPYSKFAVGAAILNNDGQIFRGANVENASYGATICAERSAICSAIAAIGPTKFCPKAICRQTLVEFGDMAVLLYSRPSKKLLKTRVQNLIPMAFTPNALNTFKSDASMSN

SEQ ID NO: 162130 - protein, 68 aa, Heterodera glycines
GRLATRASRAGAITAHRHGQRRAIDGIFRIYSFYVNTNFLFQIENLLAIKMHSVTKKKKKKKKKKKNL

SEQ ID NO: 162131 - protein, 123 aa, Heterodera glycines
  unsure (1)..(123): unsure at all Xaa locations
MESSDANNNINNSEGEAENTTKNGGEEGVEKKILSKGVSGVANXVNVMNGYGFICRDDTNDDIFVHNSAITANNPSKIQRSLGDGEKVMFDIVDGAKGPEAANVTGPDGVPVQGSKYAADLSQ

SEQ ID NO: 162132 - protein, 80 aa, Heterodera glycines
AAKLSLHGPLIRNAQDTTCRGKNCREEAAEIKNGNCGQKGNCWSQEKERRQVNDNKRTIGFETIDRIHCFATSYLLKNCY

SEQ ID NO: 162133 - protein, 58 aa, Heterodera glycines
GRQVPPLPIAINDQPHRGFPSPQTAARRSYSMPIYALPSGKQKQQQQAQDDDKEQQRG

SEQ ID NO: 162134 - protein, 112 aa, Heterodera glycines
MSTDRYDIVLYGASGFTGQHVLESFVKNGHLDQFNFAVAGRSEKKLKQTLEDIEFITGKVLTKIPIIIADSSDAQQLAEMAKQAKVIVNVVGPYRLYGEAVVKAAVENGASH

SEQ ID NO: 162135 - protein, 113 aa, Heterodera glycines
MSAESPTTSQRRARSRKTKKRAASAGETKPLRRSARIAAQKAAKEKAAKQKARDGSTASTKSAGRGRPSRSPKKSGPKSRRSPAGRGGGRSQTPRKKKQPLKKKAPGPRSRTP

SEQ ID NO: 162136 - protein, 117 aa, Heterodera glycines
AAKLLLLLDLHCTGANTGLGLHFVKSLYASGTYSAIVLACRSEQRAKSAIEQICCGQSSPAENGNGTQTKLEFAKLDLTCNDSVRTFVSQLDERPYQKGSLRLLVNNAGIMGHPFQL

SEQ ID NO: 162137 - protein, 75 aa, Heterodera glycines
GRLISALRFDRVLACKSRNIDLSASGAELDLIGIEFSPTDPPGGSALILFAGGGALRLDLECLECELADLGRDRG

SEQ ID NO: 162138 - protein, 87 aa, Heterodera glycines
PPSLKMETGPLKLLRKKFSIEWRQIEAIEKMKKKGSPNVRVFAFEDPSFKPGCRKFVVSGLRNFYLWYRECPIRARHFYELIIERMP

SEQ ID NO: 162139 - protein, 124 aa, Heterodera glycines
AAKAKMTSNSTDGWGCNNSGWGQSQAKMTSNSAADGWGCNNSALRPNQAKMTSNSTDGWGCNNNGWAPSQAKMTNSTDGSGCNNSVRGPREFSRSFSGRPGFNRQPVVFFCVVNFGTSSYFFSL

SEQ ID NO: 162140 - protein, 89 aa, Heterodera glycines
MSDEGQQLLESTLRNVLDQQSLRWIFVGGKGGVGKTTCSCSLAVQLAKYRRNVLIISTDPAHNISDAFNQKFTRSPTKVNGFDNLFAME

SEQ ID NO: 162141 - protein, 56 aa, Heterodera glycines
MARRRRKKEPRKVSYKLYVRRVLKEVHPGKEISMRALNIMNSFVIDALDRIATEAA

SEQ ID NO: 162142 - protein, 88 aa, Heterodera glycines
AERRKEQRKKEAREAEQQQAAQAQTQKAKEQRQTQQPQKPREVEQQQTPQTQQQPKKAKEDEQQQQAAQSQQQPQKSKYVPPSMRKWR

SEQ ID NO: 162143 - protein, 57 aa, Heterodera glycines
  unsure (1)..(57): unsure at all Xaa locations
MGSARLGEAQRKQLLEPLLKEGGWQMEQGRDAIKKSFTFRDXNEAFGFMTRVALKAA

SEQ ID NO: 162144 - protein, 43 aa, Heterodera glycines
SSLSLHLLTGRSLFRFRPSIRRSLLHLLTCRRSDPGTSPALAA

SEQ ID NO: 162145 - protein, 113 aa, Heterodera glycines; identical to SEQ ID NO: 162135

SEQ ID NO: 162146 - protein, 60 aa, Heterodera glycines
AALAVGCTVVVKPAEDTPLTALALAQTSQEAGVPSGVFNVIPSDREETAEVSKFLCESQD

SEQ ID NO: 162147 - protein, 85 aa, Heterodera glycines
ELSNALLLTRDGVKQSSSSLSWSLFGWCPAYDVHSHFGQIVDGLVYRRQKQGYGVIQKTEWRQNITKEGKGVGHQPTEGRNILAA

SEQ ID NO: 162148 - protein, 37 aa, Heterodera glycines
GRQEGKTNFFEKRVSEYQKMGVISTEEQREFRLDADF

SEQ ID NO: 162149 - protein, 33 aa, Heterodera glycines
KAQAQNSATKRTNRAIRDITKANLEFYLKPWRP

SEQ ID NO: 162150 - protein, 37 aa, Heterodera glycines
MPRYDATDDLSGAEYLASIYGTEKDKVNCSFFLRLAH

SEQ ID NO: 162151 - protein, 113 aa, Heterodera glycines; identical to SEQ ID NO: 162135

SEQ ID NO: 162152 - protein, 44 aa, Heterodera glycines
GRQDGGSPGQPGNPGGNGEQGQPGAQGSSGQCYHCPPPRTAPGY

SEQ ID NO: 162153 - protein, 66 aa, Heterodera glycines
VHTLSRRAREYLTDRARPRPVPAPLSLQFIVFSSLKCQIEQTHLNSEETEEEGAVHFISKTECISN

SEQ ID NO: 162154 - protein, 113 aa, Heterodera glycines; identical to SEQ ID NO: 162135

SEQ ID NO: 162155 - protein, 76 aa, Heterodera glycines
MFPPNIGLASNMMVNSPYMINAIQPNLPGIANQRTINIDGIPRDIRFYDEVTIAFMKENGGEPMEIGFHSGERLIL

SEQ ID NO: 162156 - protein, 70 aa, Heterodera glycines; identical to SEQ ID NO: 162114

SEQ ID NO: 162157 - protein, 169 aa, Heterodera glycines
MICGQSLLLFLPLFVFLQHFDSSAGGEQRSWKDEDGVEVEIIKKIPDSKCKVKSEAGDELEQFFKLTDKEGKLIGSNFGQKPYKFVLGHGQAIRPMDNAMRGMCVGEQRRVTIPAEALAENERPQGVGEDQAMHYFVELKSIFRAVPGEKWMEDDGLSIEVTHKIEEDK

SEQ ID NO: 162158 - protein, 135 aa, Heterodera glycines
MSYAYVLQPHKNSVCLMGWPTTHSVIIRQRHRAETEQARIYWPGSGLRTKSEIEEEFKCARDGKYPEENLEDWSITGKRSLTQKALFHYTDRRAGKGYSDFATTLYYGRPYIWPPVREINRWHFFICVTFALVIL

SEQ ID NO: 162159 - protein, 64 aa, Heterodera glycines
DDFGTCKAMIGQLSMLFLGKCGDEHKFRQQLPPNYDHLQLRFRVGPLYFGSLLPALVAYAFLAA

SEQ ID NO: 162160 - protein, 66 aa, Heterodera glycines
PPSNQCTAMVEADILCPTKHFPELAWARELPKADSHYVTNVEFTEKDELGMEVRRNGRPMPVEYLL

SEQ ID NO: 162161 - protein, 45 aa, Heterodera glycines
GRQGDGGNPGAPGNPGGVGEPGQLGAQGASGQCYHCPPPRTAPGY

SEQ ID NO: 162162 - protein, 80 aa, Heterodera glycines
LLIVFFLFFGHFHPLWFVPWKTSIFLAFIFPADAQHFVRFANWPIASGLCQCHVRKAAQSEQSESENEEKTERKHFAWRP

SEQ ID NO: 162163 - protein, 70 aa, Heterodera glycines; identical to SEQ ID NO: 162128

SEQ ID NO: 162164 - protein, 56 aa, Heterodera glycines; identical to SEQ ID NO: 161876

SEQ ID NO: 162165 - protein, 159 aa, Heterodera glycines
  unsure (1)..(159): unsure at all Xaa locations
MEPSLLRYFCPRQFRRLATTSFCTLSPRHRIIAEGGMPPLEYEFEREKWAMGXRFGRYGLRGGVDISKLWLTVEEIEEVKAVRRFRTAKEAQHIAKMESEKEQIRRKNRLDRIERNWATYDAQLAEFNQREVQTEAEKETADQELKRQVEEVRNYFGYW

SEQ ID NO: 162166 - protein, 86 aa, Heterodera glycines
MNPDERQMWRLPYHHGLLPREDVTELLPNDGDFLVRTTEETSGTERVFALSVNVGGLVNHVIFRRHNGMYTVDKNSDKVFRTIERF

SEQ ID NO: 162167 - protein, 89 aa, Heterodera glycines
IFNQMACSVRLDHHILLPSHFFPKFPPHGPPPPIPPPYGEPYIPRLARRAAGSLSTLSSCAVISAEKAHKTTKRKAMIKRRGDILALRP

SEQ ID NO: 162168 - protein, 96 aa, Heterodera glycines
MDALKRLASRARQKSAEIILSAEKTEIGAELEQLLTKTDKTEEHMKKLVHAIEVYLQPNPAVRALDPRKDKSGRQNTLDGLGEAMKEAASKAVGAE

SEQ ID NO: 162169 - protein, 103 aa, Heterodera glycines
PPRDNGSKKCQLAYDQNQCHLELISLANGEPLDRKTAFGRIAFATATENLRPLEEKVGTKRIHSPLISLGTPGKATVWVVILKDPNEHEICFVGDEGFQELSK

SEQ ID NO: 162170 - protein, 246 aa, Heterodera glycines
GRQASIVIASDTCPPEKILMNRVVRQNLRVKLGDVVSVSSASNTPNGLRIHVLPIDDTVEGLTGNLFEVFLKPYFLEAYRPVYKGDTFTVNAAMRTVEFKVIETDPAPACIVVPTTIIHCEGEPIKREDEENNLNDVGYDDIGGMRKQLAQIKEMVELPLRHPMLFKSIGIKPPRGMLLFGPPGTGKTLVARAVANETGAFFFLLNGPEIMSKLAGESESNLRKAFSECEKNSPAILFIDEIDAIA

SEQ ID NO: 162171 - protein, 225 aa, Heterodera glycines
GRSPVVFGGRECARIAGDATAKFDVTTLADRANGGGHSTGRSQFNVHILKPMKSFPIQNEFCSAPKALAGGVFRWRPLLSRPPLPRPFRLRWNGMQCPTVPLHPQSLRLDSVRRILLTNVPPNGNGWPSRCPTNGRPPKWPIPTKDKGASAKKWTFLRWSALHRWHQQNHRQRLRFCRSQGIRKGSRFSSSEYVSSLCLLHLSVQWHPNAAPTRHQHSTRESRRS

SEQ ID NO: 162172 - protein, 54 aa, Heterodera glycines
YPFLAQLSSVLLGVSRFVSTVPNWIHGHRVECKTKDWIELTNPATNEVVGLVPE

SEQ ID NO: 162173 - protein, 87 aa, Heterodera glycines
  unsure (1)..(87): unsure at all Xaa locations
GRQGHAATLAKASPAKKKSPIKKAKKAAPPAPAAVPKKTSPKVPAPAAVKKVAVKKPTPKKAPKAIARKXAAPPPPAPAAKKAPVPS

SEQ ID NO: 162174 - protein, 70 aa, Heterodera glycines; identical to SEQ ID NO: 162114

SEQ ID NO: 162175 - protein, 60 aa, Heterodera glycines
GRQGGFRMYYPKMIRLPSELISELASALPLDPRWAVIRVSSAFDFFVYAKQIIYRKIKLG

SEQ ID NO: 162176 - protein, 102 aa, Heterodera glycines
MASSGDQSLRDALECPVCKDLFTEPKQLDCGHTYCLNCVNGLEKVPNIVHRIVGDDYFDTLGVGPLSTLVQSVQNNVQCPQCRKMCLVPDSGLSTNYAIKDM

SEQ ID NO: 162177 - protein, 88 aa, Heterodera glycines
PPSGKLTQGPPVVGPPGPSGPPGQPGQPGENGQPGQPGNPGPQGYPGDGGSPGQPGNPGGNGEQGQPGAQGSSGQCYHCPPPRTAPGY

SEQ ID NO: 162178 - protein, 36 aa, Heterodera glycines
PYFLLFTDRCLLPLLQSYTVMESSADEVTSKELQIN

SEQ ID NO: 162179 - protein, 169 aa, Heterodera glycines
MSSHSSSVVVDNCCPPSQMTTSSSPAAFRSSALAFLQFLNKSVTPFHAVESVEAILKSANFVQKSEYDKLQIQPKDRFYVKKSETSIFAFAAGGAFKPSEAGVSIVVAHTDSPCLRIKPVSKKTSEQFLQVGVSLYGGGLWRTWFDRDLSTAGQVVFRESADAPIRHKL

SEQ ID NO: 162180 - protein, 77 aa, Heterodera glycines
PMSSLFSTIFIQCSPIRTLICPLRQWMAASLLLNHLPMLRDNICGLSFANLAWSFPPPAHPSPIVHHFVLSKSQPRS

SEQ ID NO: 162181 - protein, 53 aa, Heterodera glycines; identical to SEQ ID NO: 162090

SEQ ID NO: 162182 - protein, 66 aa, Heterodera glycines
AATIMVATTIMCGCHDDSHQNHADEHHICHRAPPNYPICQKCLCEQVPRKESTKVSIFFVNMIKVG

SEQ ID NO: 162183 - protein, 97 aa, Heterodera glycines
  unsure (1)..(97): unsure at all Xaa locations
RNSQCVYNLNAPRQESDARNLPADPHCPTMDGLATLPAMSTHMFGGESRIGIAXGACANVLLHYPMIHHNLLDALLLVNASSXKAVWVEWAYQRWNE

SEQ ID NO: 162184 - protein, 117 aa, Heterodera glycines
GRQASSAAGFALYRCHTGLGLHFVKSLYASGTYSAIVLACRSEQRAKSAIEQICCGQSSPAENGNGTQTKLEFAKLDLTCNDSVRTFVSQLDERPYQKGSLRLLVNNAGIMGHPFQL

SEQ ID NO: 162185 - protein, 163 aa, Heterodera glycines
KPIFFSVGQPKSSFTGGNASGGSGGMPPNPFQGMSNWQKMAVAAAVIVGLQYFINRLAYTEISWKQFYTDFLEKNNVERLEVIDNKWVRVITRDPTQTVFYFNIGSVDTFERSLTQAQQHLGMETSQQQVPVLYKSESDIVGMIPHMVNFLITGIFLFYMFRM

SEQ ID NO: 162186 - protein, 54 aa, Heterodera glycines
RPEESQFRVVNVKPVTLYDVAEYAGVSYQTVSRVVNQASHVSAKTREKVEAAMA

SEQ ID NO: 162187 - protein, 67 aa, Heterodera glycines
  unsure (1)..(67): unsure at all Xaa locations
GRQASLRGFEPPPDVEVPSEPPVEWRAWLNKSRRFPPSEEEIQLNLLKQQAQLVQXTETEKKAPMIV

SEQ ID NO: 162188 - protein, 54 aa, Heterodera glycines
EVRLNSSNIGTESDLAVFAFLAIGKPQIVEAEHGTDQQQNGEKTKRGHFVILAA

SEQ ID NO: 162189 - protein, 57 aa, Heterodera glycines
PPSKMHFLFLSVFSLFLAKHCSNAIPIGAGNQRDVRRSMVIDLLNANQEFDQLRSQL

SEQ ID NO: 162190 - protein, 84 aa, Heterodera glycines
AAKQAPPSLGPPGPAGPPGQPGQPGENGQPGQPGNPGPQGYPGDGGSPGQPGNPGGSGEPGQPGAQGSSGQCYHCPPPRTAPGY

SEQ ID NO: 162191 - protein, 102 aa, Heterodera glycines
MDIDELKKMSPEQQNKLLEDVRRQSDTQSVLSLLASFSEKCSQRCITSPGNTLSGGEKQCLQRCVDRWLDSFSIVSTAFAAKAQQMAGMGSFGSPDGGPSFS

SEQ ID NO: 162192 - protein, 53 aa, Heterodera glycines
MEETPISLLRMAREAEKEQKEEKKEEKKEEKPEEGKKEEKKEEKKEEGKQEEK

SEQ ID NO: 162193 - protein, 171 aa, Heterodera glycines
MPRRVYGIYRSASTARMPSESRGTEFAAARSASLPRSRSNIDIPAFGCAGANYMPFTGFSAVKSDIYRVNPLYSLRNYMSDKYYHFSHRYKRTQFHRHYYHGQIDQYPYEWNFEGRGTATGQFYFARRMKFNPWQFGWNRFYDPYRRYYDPYHDAYIKLYDYRPRLIDGIY

SEQ ID NO: 162194 - protein, 40 aa, Heterodera glycines
INRSVNVTFSPQNAHSSSTGSAPVPNCILKSFWSNLIKYI

SEQ ID NO: 162195 - protein, 62 aa, Heterodera glycines
ANLKMKFTLLSILFLALVHIGISGKYDKSDEHDGKYGARPPASGGYHHDNNNYGGGNHYVAA

SEQ ID NO: 162196 - protein, 1151 aa, Heterodera glycines; identical to SEQ ID NO: 158700

SEQ ID NO: 162197 - protein, 593 aa, Heterodera glycines
  unsure (1)..(593): unsure at all Xaa locations
MHFHKLFLLLPILLLHLQQSQACFSRGNSGEPSDGNPEAQGLKSENDVRTVQLKKEKQTDETEEEKDEESSAEQKLPSELDPEFVKTYLREFGHLKHNENGLSHGVKHFQRFLGYRQTGNVDLATLQKMSWKRCANSDEGYTAQDPSQLWERSTLFWNLNASHPKQFTHGETKELIAQAFRAWEIVIKIDFLETNNADNAQIIFTFESDGAKKEKSKNGEEEKEKEGKTGKSLSDLISXDRLASSPPVARIVLNADENWSTFQTQEEGKIDIFVVLLHEIGHALGLRHSGDEHSVMFPMFERSVGEHLPVISNDDVEHLRALYEGDLTDRPTLAADLRPTRPVPVQGGTHSTDSYGGEGATTAAGKEAEKCPHSITTAANVNSETLFLFKDGYAWHLSRGKLVGGPYKISEFFPDGPEKVDVAFSSGRLTVLVKSRMLFGYEFDQKTAQFTRDHRYPRELHSRILFYPEGAFPIVNGSVILFKDDVFATYNVESNTPHLFGSMSEFFPGLPQNLRAGFAATPDFTTYHMLTNDYAFLYDVRVARTVSSQSIGQFVGCEGNKLMPPGPPMPHLFFPYQPSPPQNPRFPQQNYGK

SEQ ID NO: 162198 - protein, 121 aa, Heterodera glycines; identical to SEQ ID NO: 158713

SEQ ID NO: 162199 - protein, 110 aa, Heterodera glycines
QSVCYVPATTTAQRRTDASTAVRSPHERASHIGAANQPSEAARHRHIATQQPYTGFHMCSTERYTTAPTYGSTPKAWLVRQLPRNVGQRPQVISNDLCPSADGGIWWCQR

SEQ ID NO: 162200 - protein, 319 aa, Heterodera glycines; identical to SEQ ID NO: 158743

SEQ ID NO: 162201 - protein, 476 aa, Heterodera glycines; identical to SEQ ID NO: 158742

SEQ ID NO: 162202 - protein, 272 aa, Heterodera glycines
MNSSVVSFSLLLFGLFTIRTAKSQCEKHCTKSKPMGQCNEAEEVILRNSDCAFMKKTETAFEFVVGMNGQTEDKTAPGANANGAFLCCKATQGTATLFIVGVANKRLMLAKDVVNYKFHQNISIDDFEREKQVLESVSAQGQKAGIGDNYGEKFFQDQMDANKMIQKGYVKLWTANKSLPPQNVPDLQKDTRPKVTAATEEMILALKVFQQFRKNKNCWASVEKELLKSQSFLSLAEPNGKDAMRKAAVRLCAKMEAKIEAQIDETAKKLLA

SEQ ID NO: 162203 - protein, 125 aa, Heterodera glycines
DRERNHHPQSVCYVPATTTAQRRTDASTAVRSPHERASHIGAANRAKRAARHRHIATQQPYTGFHMCSTERYTTAPTYGSTPKAWHVRQLPRNVGQTSTSHLERPVPISGRGHLVVPTLAQQDSR

SEQ ID NO: 162204 - protein, 177 aa, Heterodera glycines
  unsure (1)..(177): unsure at all Xaa locations
RPGGGFAVGIVPGGAAEALESFPGMNRLITSRRKGFVKLAIKXGVAIVPVFHLGETDVYEQKESREGSTLKKTQNLLKRLTRVSFPLAYGQSFIAALLPEETAQKLPRWLRVGIFPYRRKIVTIVGEPMEIEENANCEDEQTVDRIHAEYCQRLRKLFDENKVKLGGLSEDSEIEFV

SEQ ID NO: 162205 - protein, 229 aa, Heterodera glycines
VQTERVLDQAVRQTLSLSDASRQGLVDSALADILMAPCGLSEGGTEVSLIRAVSKGLVDASKGVVVDPRFQRELSVREAYDRGMFTSLRSAMHLAALLDVHPSLMTPVKKKPYSKKRIQRPGQPALAEDQVKVTLAEAMRQGLIDARTQRFRQGNQEMSLDDALHRGLIDPQSEWIVPSRASGIGPTIEERTQETVTETGQQLAPKIFPDKELQESVNTVKRVRRTETS

SEQ ID NO: 162206 - protein, 302 aa, Heterodera glycines
AVAPPFGQLSVKGTNLVGSNGKPVQLIGNSLFWHQWYPQFWNAQTVKALKCNWNSNVVRTAMGVEQGGYLSDANTAYRLTAAVIEAAIAQGIYVIVDWHAHEPNADKAIEFFTKIAKAYGSNPHLLYETFNEPLDVSWNDVLVPYHKKVISAIRAIDKKNVIILGTPKWSQDVDVAAQNPIKGFSNLMYTLHFYASSHFVDGLGNKLKTAVNKGLPVFVTEYGTCEASSNGNLNSGSMSSWWSLLDQLKISYVNWSITDKSEACAALTGGTSAANVGTSSRWTQSGNMVASQHKKKSTGVKC

SEQ ID NO: 162207 - protein, 448 aa, Heterodera glycines
  unsure (1)..(448): unsure at all Xaa locations
VAPPFGQLSVSGTNLVGANGQPVQLIGNSLFWHQWYPQFWNADTVKALKCNWNANVIRGAMGVDEGGYLSDANTAYNLMVAVIEAAISNGIYVIVDWHAHNSHPDEAVKFFTRIAQAYGSYPHILYEDFNEPLSVSWTDVLVPYHKKVIAAIRAIDKKNVIILGTPTWSQDVDVASQNPIKDYQNLMYTLHFYASSHFTNDLGAKLKTAVNNGLPVFVTEYGTCEASGNGNLNTDSMSSWWTLLDSLKISYANWAISDKSEACSALSPGTTAANVGVSSRWTSSGNMVASYYKKKSTGVSCSGSSSGSSSGSSSGSSGSSSGSSSGSSSGSSSGSSSGSSGSSSGSSSGSGSASISVVPSNTWNGGGQVNFEIKNIGSVPLCGVVFSVSLPSGTTLGGSWNMESAGSGQYSLPSWVRIEAGKSSKDAGLTFNGKDKPTAXKIVTTKKC

SEQ ID NO: 162208 - protein, 191 aa, Heterodera glycines
WSVDDSVIHTDYSALRSIVMSNREETVKMPINEPAKSRKAVSQIQEYVDYYGGAGVQHIALNPSDIVHAIQSLRAPGLEFLSIPDSYYASLKQRLSDAGVELKEDLEKLRELKILVDFDEQGYLLQIFSKPCQDRPTLFLEIIQRHNHQGFGAGNFKALFESIEAEQNERGNLFYKDVAVGGEKIEAKKSE

SEQ ID NO: 162209 - protein, 130 aa, Heterodera glycines
MPMTEKQETAPKCATNVAARSCACCEHVTVRKIRLDDEVCVNVTYLPTKIGVRLAVSVDGHVYYSKDLAVFNPESACFEVPEMREYASICINLYNMELKNNKLTGCAKLEAILLHLRVAQHKIGCFSIPI

SEQ ID NO: 162210 - protein, 125 aa, Heterodera glycines; identical to SEQ ID NO: 162203

SEQ ID NO: 162211 - protein, 150 aa, Heterodera glycines
MFRFSLLLLLVPLVRCVPNPKPLFGIGIGRKQSAGAEGKLTCAGEPLADVKVKLYDDDRGVDTDDLMGETRTDSEGRFRLEGYTHEITTIDPKINIYHDCNDGLKPCQRKISIMIPDKYIASGEHPNTYYDAGTVELEGKFSGETRDCLH

SEQ ID NO: 162212 - protein, 187 aa, Heterodera glycines
MMMVRSSSSSFSLPSYFLSLLPLLLLLFSQCSQISFACQCQWAPPKDNYCSSDWVAHVQVIKRQDGVRMPAGITDRQTDLNSRHEVKYLRMFKISKQMPVNQQNQVILPVNVYTATEDAACGILLESGHQYLLAGDYVNGTMLTGLCRQILLEDLKESRKHDILEWTEVPQKLKEQLEKQEFDQKCN

SEQ ID NO: 162213 - protein, 203 aa, Heterodera glycines
MEWARIELEKRFAESMRRLAEMQEQCDRVEHINQQLQLENETIADHVVLYQHQRRLIRERLRLKDEQMAALEKERERVVARCNELQEALRQVLGNGRDEVAEFRPRLYSHSTVDEFSGDEECIVDSAKENSQSLLPNVHHSPETNGQKEIRSTEENSPSTDWTNREDAVKKIMDIIDDIKKPSMPLSSVKMQCKQCIGPVLHL

SEQ ID NO: 162214 - protein, 338 aa, Heterodera glycines
MEEHQQQKKTAEIYSKYFVVGEHRLSVNLPQQHNANTYYSNPPYSVHVRDWIDGKKWEFSVTKPINSQQCLLKLAMLETDLASNPVTAEIVFWQWFRGKQAHILQKSVKVFCQSGAQVQLQHNAGAANAAPSDGFFNVLIRLLEKREHQIIENPCPPCDSENEVVLKVGPEQFTVSKHFLMSVSPVFHKMFSVDMLEKAQGEVSLEETNGEEFGAFLDAISPKMASPNPANVMGMLKLADRFQVDALRNRCEAHLINCVEISLIERLLCAEMYRLEKLKNFILKSLNGVGMREFYEENQAALNLLSKDLLIQLTVRICSSSKIDRSALCHNCTKILNE

SEQ ID NO: 162215 - protein, 203 aa, Heterodera glycines
MKRNGNSICSETKPPLLELTPKNVLTFRGKLGHVGSVSLDIKNCEICSVYFKVKSNANHFYSVRPNTGVIGAYGRVKVVIQLHDDSLAKLDEIEENKHKFLIMAAIVSDASIGTEKFWKGKKEGMDGIYSSKMKTEVHKVCRWEGGKGVLSQQNSEENVPNGKNSVSVEKVPNQILELCSEKEAPNQFSNLEENVPNGKNSML

SEQ ID NO: 162216 - protein, 197 aa, Heterodera glycines
MEWARIELEKRFAESMRRLAEMQEQCDRVEHINQQLQLENETIADHVVLYQHQRRLIRERLRLKDEQMAALEKERERVVARCNELQEALRQVLGNGRDEVAEFRPRLYSHSTVDEFSGDEECIVDSAKENSQSLLPNVHHSPETNGQKEIRSTEENSPSTDWTNREDAVKKIMDIIDDIKKPSMPLSSVKMQCKQCI

SEQ ID NO: 162217 - protein, 184 aa, Heterodera glycines
MSISLADRMKLLLTNGDGADIQFLVGQGEEKEVLKAHKLILMAASDVFKAMFRFDAQNAKTKTSSSAEQLQSVEITDIDANVFKVMLSFIYAEDSSGLTGDNLIAVLYAAKKYHISLLAKACADFPLENELPNVFLAFDQAQLLDEKDFAIRCLDYINRKAETLFGSEEFLQIGQNLLSKIFAS

SEQ ID NO: 162218 - protein, 51 aa, Heterodera glycines
MSGVSNGGFDKADDNASQHRSGGVSGHRRATGDATDRHFQRVVVGFPSTYL

SEQ ID NO: 162219 - protein, 155 aa, Heterodera glycines
MTSSQPIIYEKIVQQNGSKNSAEWCLASERRLLQKLIHHKPVGINRHFNLNLLVIYMNNIFDFEEDINFDDYLSEKDVEQLKRRRMEGKQDERRPMAFSPSYAIRPTTKQVEEKLNEYFDMELIGENESPSEELEKKAVFELPQEYQFKEEMVPR

SEQ ID NO: 162220 - protein, 249 aa, Heterodera glycines
SPVSKGILQYDMWDVVPTDLWDWPLLKERISKFGVRNSLLVAPMPTASTAQILGNNESIEPYTSNVYSRRVLSGDFQIVNPHLMKDLIELNLWDDQMKNRLIAENGSVQNIKQLPQEIKDLYKTVWEIPQKDILKMAADRAAFIDQSQSLNIHIAQPNYAKLSSMHFYAWSLGLKTGMYYLRTRPAVDAVQFTVDKMALRGTIAKDESVEIDVLKDKENISANSELRLPSKRKYNEQLEESDGCLMCSG

SEQ ID NO: 162221 - protein, 88 aa, Heterodera glycines
NEATQHLLYKIFVITFRLLVRFSPAVCLRSNDPFQFHCIFDVLCNNLTTLQRLPLTFNATIRLRHLCRVRPPGVRRRCRAGRSPVGLH

SEQ ID NO: 162222 - protein, 221 aa, Heterodera glycines
MMLWGSPSPVSTDETKDKIGHDYSHLELIKGDTYEIGMEPSSVGGTSAGHNAKPFFALDQLKQAGVPLKAQINPYLQLDPSIFKESQPQIIMPEGYESGRGKFEFALGYIGCSVIGGFGVGSVRGMFGELGNPQNRTLAWNPWYTRMLNAATKHGSGYAQTAGTAMFLYSVTELGLKLSRADDLLNSFIAGPIAGGLFRGLPHGLRAGSVGALAGLGLSPS

SEQ ID NO: 162223 - protein, 373 aa, Heterodera glycines
KNIFVQTMRVTIIAGENVASLEISADMELENFLALCKFELPSIADTPIERIALNCSGRQFIANAGLAKKQLKELNIQHEDAIHFETISASSTAQTPHSSLSTPSSAASTSLGAPLQTSNLISSLVQNIKVPQKQKSVAEDRAMSDQIFTMLQHPARLDFLRVDHPELAAAYEKNPTDKDLFYIAFMKNKEEQTRRVRLMYDHSSEEGQRYIAQEIERERITRMQELAMEHMPEAFIPVHMLYIRMKINNHLVIAFVDSGAQASILSESCARRCDILKYVDRRYRVQAHGIGGSQKMVGRIFACQVQVDDNVFACPFEVMSDRDVDILFGLNAMLRHRCNIDLKKMVLRFGDGTETPFLSEQEVKREKEAIAMA

SEQ ID NO: 162224 - protein, 177 aa, Heterodera glycines
KSHTNQSIKIKSNFCIFFPLIFCWGIEMMASRSRPSLRPPRLVTFLSLSLAFAFAAADDVPAVGGCGGGRSNSAALPISGGVVVHHWHGRHSAGVDGNRKNVANSGHGFALPTDDEGIVTPSVPKAHGRNAKTRTRTRLHQNYTHAIFIGFLKLDQSGGDFLNDTLVPFYCFGMLIG

SEQ ID NO: 162225 - protein, 151 aa, Heterodera glycines
EPKLFCSHLKSQQPEMCLNRVVLGPEITRRPAAMPFWADLAQGNNDNRDGANWEGARHFEHWLRRGSRAHKCPICQHLTPTQSVMLALFASIFECIFLLFSTFGALASVMRPKMKGFLLLALLPLVTFLPETMAKSIQAAEMSEMNDELSD

SEQ ID NO: 162226 - protein, 39 aa, Heterodera glycines
TFILLNDKLMKFTLKMKHKLMALFVPTDHFPPPPPLSLS

SEQ ID NO: 162227 - protein, 226 aa, Heterodera glycines
MHKGSLVPLFGKNLQQNSWRAFGEKSPLKRWRLNKLSAFKWLISFLFSKSLPLVLLLIILLLYFQFPLNLFGPSDGTDFGRIISNGTFLAKFVDFQKRFSKNYSTIEEKLTRFSIFVANFEQLEKIRREGEVYGITTFFDCSDEELKELIMPHEYFESVPFSWAKPIREFRPMDANFKRPSEFDWRKNGVVNHVKNQRRGGACWACATARLGQVTAPNSQRNTGSL

SEQ ID NO: 162228 - protein, 284 aa, Heterodera glycines
MIQINTSSDLNEKVYDAIVVVSDGINSLSKVDKFSADLRNAVESYSKIDHSLDKGKVSLIQADKFHAKRIVYASTGTVHKDFDDVRRYTKAGIAAGETALSAGVRSPLLVAVPSERFPNASLMAALGFLHTLYTPLNLAVPDKPIRKVDLLGIFEVEANEKSNVGPSVSMLQALQQSFNVARDIGDGDPERMCPAKVAEYVKKTFENSSVRVSIIDDVDQIRRDYPLMSAVSRCANAIEEHKARLIWLEYDGGEETETLFLVGKGVTLDTGGVHLKVNGAMLRM

SEQ ID NO: 162229 - protein, 165 aa, Heterodera glycines
MSSILKVTFHWKEPKKAHPFPDSVVLKIPGPKYNSLVAQNGREEQTDNAMEEESSDYLIKAHTNEILFYKNFPRFDASLRLPKFYFGSDYSPSHNNGLIIMEDLSSRASSLLTLPGFDDAHVLVVIDELSKIHAISWKHGELKQHFPIEIRPSFIESMRSNAKQL

SEQ ID NO: 162230 - protein, 131 aa, Heterodera glycines
MTCVKKIEFPDEPGFFCSDRLARYEQSMLIETGHMYAQAARNNSEAARNNSVTAQESVRAMVNKDRLVADKELLLAQQKIELDEKDRLIATLRDTIQNKDQRIVYLEGYINGLGVPLPAPAEQQQQDGGGQ

SEQ ID NO: 162231 - protein, 197 aa, Heterodera glycines
TNFNFYRMGPNEEAHKHNSSSTPNRIDSVESDDDEIAGWRAEGWRIGFDVEMRVGVAGVDRPHESAESESDATEDGHNTAFDAENGPSLNCGYVLLPSSAVDDAPPSPPASTPTATSPTHCQSNWLLPAPPPAADLDSIQHKPNDFNLDRVKTEEIKQIMAQMSVSSRKPEWAQQIDDGKLAELVERLKKRKVTEGK

SEQ ID NO: 162232 - protein, 113 aa, Heterodera glycines
MASTQELAVIYAILALQDEELPITAEKVQTMVTAAGVTVEPFWAGLYVKALQGVDVKALLSAVGSPGSGAAAPAGGGAAAAAPAAEAAPAKEEKKKEEVKEESDDDMGFGLFD

SEQ ID NO: 162233 - protein, 280 aa, Heterodera glycines
MLFPFRFVLSIRIGAALPHSFCSFSDAFPSSGDRILIRRENFNRNRPRLLKRNEKSLLAENRQGIPTATDCATLVLFCQLGSPSAEESWVLFTQRAKRMKHHANEISFPGGRIEQGESVETAAIREAEEEIGLDRNDVELWGTLRPLFFGEAGVVTPVVATIGQNVEQRLASLRCADAEVQNIFMASVSDLLARIHYTTFRFSGKPSDDKMPFFFRMPIFHSTKPRLLCNSSLVNCPEKFRIWGLTARTLLEALNAFLPEDAKEREASELLRKGKTDNSC

SEQ ID NO: 162234 - protein, 212 aa, Heterodera glycines
INSKFLLFVKCNSSPFLFLMMGPTQKKARLNFTIDQLIVRPLRDSQRVNVVPPPTVTNAAQQTQQPPLAALQQQTLQQLTNVRWPSLPSSAFRPLFPPPLSAPFAFSPFALPSLFFSSPPFSLPIPSSLPNNLSSSFHPSPFLMLTPPTRAALMAIALRRQQQQHFGSAGSSTGPSSTCSSSQSAGTTECVAIRTENRPCVVSPALRHKNLT

SEQ ID NO: 162235 - protein, 86 aa, Heterodera glycines
LSVIQLCVTYGNKNLAFRLMDRLNAYEEQVKAYLILGEVKKAATLAVEREDLQMLQSIKCRLAPSSANWEEVKKITDTLLKKAAHA

SEQ ID NO: 162236 - protein, 113 aa, Heterodera glycines
IIVIGTQFGHFFHFSIRIHRYFFNFQFASVFQAEADLRVAQAEFDKQLEILRILLESLQTAQNQQSKHLLEFVEAQAQFFSACQQHMADLKREINSASGERFRSNGINGGGGI

SEQ ID NO: 162237 - protein, 141 aa, Heterodera glycines
NTAFFLSIKSINFFIFNNFLFHFCRQNFVQPGFSLSFFNPFICFFRFCLRIHAQVGGCWPSSKSLSAFNVSSWHSIFFCAGKQSRREEPIGSSVKHLSWFSMPKYFGGNAATPPTHLSTQPMSKRTQKTNGKLKKDFIFYQ

SEQ ID NO: 162238 - protein, 215 aa, Heterodera glycines
LRKSNSKTLRQQFEPSACNKMFKSPTIVLVLITFIILHIAVPSAESFINLSAVGDFFANLWDSRADNCFYAARYHGNVSDQFHEKVKYWEIEDVQNVSDRRISKDCSGSFYGCQTHACIDAKGNPVFVFNLCASSAAASGENNTGHCSHPELEELCAMEGGKSKCAICENGMCNEANIELQNVMGLDINGTIGTAVVENGTKSAKTGETGGDTTD

SEQ ID NO: 162239 - protein, 110 aa, Heterodera glycines
MNPTYPMVFFLLVLVAVVLSSVHLKEDKIDVPQRVKRGEYGGGAYGGDGGGVGAPAPGGGGAANIANVNINQQNGCNGRGPQYQWAYTRKTGWVCINIINVIINQQSGGK

SEQ ID NO: 162240 - protein, 96 aa, Heterodera glycines
TDNENIPFFLPFNYIFSFFKLQFKLSNFSNRIATDSFHSAFIGTHLASTRQISRWQCQNASSTAFCLSCAVLSSSVSGKYFLSNWPGHSLHSAGWY

SEQ ID NO: 162241 - protein, 197 aa, Heterodera glycines
MGSEGKILTGNINGETESKEVNSDEMNYLRQVGEILSRGTVRTDRTGTGTISIFGMQTRYSLRGGTIPLLTTKKVFWKGIVEELLWFIRAETNAKTLSSRGVKIWDANGSRAFLDSAGFTDREEGDLGPVYGFQWRHFGAEYRGTDADYTGKGTDQLAELIQGIRTDPNSRRHILCAWNVTDIPQMALPPCHTLCQF

SEQ ID NO: 162242 - protein, 93 aa, Heterodera glycines
MNFYKSTTFIGLFFIILANSFFDHADDPKLASSFLCCAIVFHFSGQNFPFRHGSVNGHRTAGSFLCECTWGKEKNNGEKSNGQKKEEAHFYLK

SEQ ID NO: 162243 - protein, 206 aa, Heterodera glycines
MAEEAVVVPEMESLALTSSSPCSPVLSLLSEEMLQKEVPCVCCDGEKVVVRLSILSQCGFFAKMLQDLNVEANGLSEDFMFDMTKAEIPAETFKKIVAWMEEHKGQPVPEFEEDPNTFERKWLTQNDFQQNFFKCEFAEAAAFLNAANFLDLQSLFRHATQAVAARIKDRSPEEIREMLHLNDKEDKPLTEEEKKAIREKNVWCHY

SEQ ID NO: 162244 - protein, 353 aa, Heterodera glycines
YLKLKIIIPKMASRDEIGQTVCDLVGNTPMVYLNKITDGCAAKIAVKVEWMNPAGSVKDRIGIAMIEEAERQGKIKPGITTIIEPTSGNTGIAIAFVAVARGYRFIATMPSTMSGERRTLLRAFNAELVLTDPALGIKGCVERAEQLAAAIPNSFIPMQFANEANPEIHYRTTGPEIWRQTQGKVDACVFGIGTGGTITGSGRFLREKNPAIKFYAVEPVESPVLSGGKPNPHKIQGIGAGIVPPILDTKMYEEVVLVHSDEAIAMAKRLAREEGLLSGISSGANVVAALRVAQKPEMAGKLIVTVLPSSGERYLTSALYSDIRAEMEAMSHGETLEDNLKRLLKVEDANSKQ

SEQ ID NO: 162245 - protein, 112 aa, Heterodera glycines
MAMSAIPIEHDAASQWDWPLQHTDGVVKVHNTKDKFEVGLDVQFFAPQEIEVKVSGQDVIIHCLHEIRKDQHGSVKREIHRQYRLPNDVDAATLKSHLSTRGVLTLTASKKD

SEQ ID NO: 162246 - protein, 141 aa, Heterodera glycines
MTLNPPHLTLRGYEGHDYMGDTFKKTNDYAQTWFVPLMRGQSIDNRQIPGDDCGFFEDQSVRCFTAFGAKLGRLYCDLEHRDLQECVSRTKKNKRFWKIRDVRFKKWLRGETPHIFEPLADYLKSVHGAPTSYPTGHRVKK

SEQ ID NO: 162247 - protein, 208 aa, Heterodera glycines
MFSKTASPSSVPYDKVSGLKLPKPRRLVYTRTSLTISVLLSGGIGYYMYKILRGDERLHREWVVPMVHRWFAPESAHILGVKAVRLGFLDDFVESRKEYPELACQMFGKQLNNPIGLAAGFDKNGEAIDGLRKSGFGFIEIGTVTPKAQIGNDRPRVFRLREDQAVINSYGFNNDGIGTVLGRVKKAFVPDSGVPLGVNLGKNKTAED

SEQ ID NO: 162248 - protein, 199 aa, Heterodera glycines
MTDRLKELSETRLHLKATKTRVTREDGSVIEEEKTENGEFVVIFERANGNGNPSGFKQSKRMQKGRGYVIDLSPDLQVANVSKSIYLSSQDVAQDLSLLQRHGITHIVNAASGVRCFFPKEMLYLKLKLLDMPSENLKKHFCRVHRFMKKSIDKNGKVLVHCNAGISRSTALVLSFLMRFEGQLLTEALALVREQRPVA

SEQ ID NO: 162249 - protein, 383 aa, Heterodera glycines
MASEDASKIVTEQRNFFKTGATRAAAFRKEQLKKMREMIVQNKDKICEAIYKDLRRNKETNMKMEVDGPLQAIDYCLSELDEWMKPQKLEDHQLGKPLVIFEPKGVVLVITAWNYPAALAFQPAIEAIAAGNTVVIKPSEVSPNTSKLLKQMFDATFDKKFIAVVEGAAPETQALLDQRFDHIFYTGSSSIAKLIMQAAAKNLTPVTLELGGKCPVVVENDADLEKAALRIAEGKWLNSGQTCLAPDYVMTTAEMKPKLVNALQKSIQTLYGENPKKSEQYSRMVNQRHFDRVKALLDKTNGKVLYKNGEPDRDDVFIPPVLVDTDLKDALMQEEVFGPVLPILTVKGLDEAMDVINDGEKPLGAYLFTNDQQKVDKFLNETS

SEQ ID NO: 162250 - protein, 184 aa, Heterodera glycines
MASSLTIEKRCKLFNTKQMECQFDGTEAGKCAFCVKLPCKFGAVNCAEEVSISCVNPQELEKCCKARDNECCVCVLCEKNKVMKVLVECCGKRTETSAEAGKALCICVPKIGGGKCGGQVQVKQCDAKLVDECCAANTESGDCCCVCLSCNDQKCVVTVRCPTGEAKSTGPTCTASKCESVKCC

SEQ ID NO: 162251 - protein, 163 aa, Heterodera glycines
MDIRSDQHRYPFCIVWTPIPLISWLFPFIGHIGIATSKGIIRDFAGSNYVSEDNMAFGWPTLYHQLNPEKVNGGSEAWDNSVAEASDEYKRRLHNLFLDNCHSHVSLALNTMRYDGKSNWNNFRVAADINLHGKFVRFCGFLRQFLPFSLILLIIAFALFFLV

SEQ ID NO: 162252 - protein, 200 aa, Heterodera glycines
MSSIEFSLPVFCSPTQLNFVIGKRDLCESKPIQIFNPYNHLLRFKFFSNAPERWRVENAQGGIRANNYVTTTVQLREPHTIRQPTSDCLRVEIFRDGESVAVGRKDILLNILTVEPPSSSVDGANFVEFSDGTDAALNSTAQRGEAKLRTNSIHNLTGENSQQRRHQQMRPSPWQLSTFYWLALAGLFACLFCLLLPPTA

SEQ ID NO: 162253 - protein, 141 aa, Heterodera glycines
KRPFPTKMSNLFVASSAVVFLLLQLHFVVTFASSFEGAPPKANEEAMPTTGEQNGGAEFGGSKQKMARKMMRYNGNNFDKVSVLFIRREMALRKLQLQINVLEQQLANALSSAFAAGCPPSGVSSVSDGISHRRHLPMPRE

SEQ ID NO: 162254 - protein, 192 aa, Heterodera glycines
MSPVFRCHFPAFANSLTFALALFVAAFSVASAEQTVTPGRHDDSLGHRCNYSGPGHCPSGFACVNTKCVRRCFFSGNCPEGFFCKSNFICVRKECAAGDTECCANCAEICIDHSECPSDGWGCVLLKCRRVECRARPDCPSNWPCLLGRCYASNCKSHEECPEGWKCGKKRRCEKGKAEEKAKGNGEENDGK

SEQ ID NO: 162255 - protein, 183 aa, Heterodera glycines
MAAKELFLAQQPDLFKPIQSINAVLILICLGSSTAVPGIGVLWFIGLCSLIVSVTATVIFLLNRENGLSGVTISGAFLPWGVIEFVYSSVLTLLCGVGFWLSFGFASHVPDNGHSAGYIFAGIFLVAQVACYAIPVLIIYDRSRTDGPAAAGHEQIANVHPFGVTTDGCEQHYQSMQHERPIV

SEQ ID NO: 162256 - protein, 215 aa, Heterodera glycines
  unsure (1)..(215): unsure at all Xaa locations
MRAQLAEADTLVLGLRDRLQQIDTNAAVIEQQLGQFSTDKETTHKELSVGVNYVQTQGEQHLAKAQEAFDRYGEKSQQLSDIAGESKXLSDRQEQRRREILSLAEQIRKESRQSLSDANEAIFGASSTSLQISALLTEVHELEQRLKAVQQMATEQSLETNQTHDGAAFILSGVDSIRLPNVFSDELMEKVKRAQEEGLEALSKTRSEAENKRNW

SEQ ID NO: 162257 - protein, 209 aa, Heterodera glycines
TVHMVGIDRHSGHFVPLMQIGHSVLADDQLISGAAQLISARTERCFTAFRQRFLTFLYREFQRKGQIQQFLHHFDLFRHVKMRKLQFVGPELLLIRMEQPKGDDDFDDHQFASSSFCPPSSSSSYSSSFAASNHQHHHHHHYQHMFVLFEWRVGRIVGVFNRSSEALFAAFERHNEQFRNGHIVRTMFPTSMEHCGAERAQHEALKQSS

SEQ ID NO: 162258 - protein, 300 aa, Heterodera glycines
ADSKERLSLRHTLESHKNWVTSIATSAEAPDLLLSGSRDKTLLIWQLTRDSQNYAIARRALTGHNHFVQEIAISSDGQFALSASWDKTLRLWDLTTGKATRRFIGHTNDVLSVSFSADNRQIVSGSRDKTIKLWNTLGECKYNIEGAHTEWVSCVRFSPNPENPIIISAGWDKLVKVWDLSKSKLRTNHIGHKGYINSLAVSPDGSLCASGGKDGIPMLWDLNDGKHLYSLDAGEEIHALCFSPNRYWLCATTTSGIRIWHLQTKEHIDTAIVSDEDEFDMGESKKKFVPPTPLSLAWSP

SEQ ID NO: 162259 - protein, 323 aa, Heterodera glycines
MAGPDSRFILEFFNREAKEIGVTQELLDNSQPSDQLIQAYYFLCDLIFENVGTTKENEYEMATELTRARPQMIIRTQQHWDLENQLEICQGLVNELRAEVDSLRGELSECKLPFRISNSELQNITVRHSRTGDAVERIGPRKANTKSLLKPRARLCSNTPKMAVPSEKRAKRGLTKDSEDDDNFRTAEFVPTTPRPQFLLPPLVLTPLSSRFPPLPRRSFSVEPTPTHIQKNAEQQLTMIRDGNGDMPCPSSQKRLNDNGEIQCPSSSTSSTFAASTSDGSAVSVFSADGGLLGPLTFLRRRNIGDPQTSWLANRIRNQGLPC

SEQ ID NO: 162260 - protein, 125 aa, Heterodera glycines
MAEFAHRAGAPLECLCMALKVQKRQEGTDAEGNRRWKIGISIGGGIDQNHRQSVYSDSGIYVTSVEANSPAEEAGLKVHDKILQVNGVDYTMITHERAVKYLKKESVLDLLVTRATPKHSTEMQM

SEQ ID NO: 162261 - protein, 87 aa, Heterodera glycines
KLNSFFFWHFCHFCWLPICCEQCSWDDVNNICVGDCSSLCVLKDFDNCNCNRLPKNLQFFKNRRNFGNLKALAKKEETNNGKLMYKK

SEQ ID NO: 162262 - protein, 188 aa, Heterodera glycines
MTSETVSSDASAAGGADKENTKTDTTTDPSSSENSASIEADHNNSKLRYADETTIIPHDLVERHFLQNTWALWYLKGDRNKNWTDCLKKVSTFDTVEDFWALYNHIQPASGLSWNSDYYLFKEGIKPMWEDKGNLEGGRWLVQVNTRNTTQSRLSLEVDKQKRQTKLDIYWQEMMMCIIGEQFEKWSD

SEQ ID NO: 162263 - protein, 208 aa, Heterodera glycines
PIQLSEVSEGVQKLNRIVAQFKQDIELRVAEEISACEELAKRVGHLSEANSAEETAQHFFNEQRLNRLIIDHLLRTGHFASAQALADFVGLDISAQYQVYHVARQVEESLALKDLGPCLAWIRDNRSRLHRIGSPLETEVRIQQCVELIKQGHHHGALKYVQAFFGGRCDVNGAHWATNGNLLHLMGLVALGKESTRPEHRPLLSDER

SEQ ID NO: 162264 - protein, 329 aa, Heterodera glycines
MNGLPPFQPQLSLFGDPQLFAATVSNPTVGSTNAAAPAAESAAALQMHGRQQQLRMRKEIYRYTCEEPLYAAAWSNKLYPDKRFRLVVGTLLLDEEGISSNKMYIIELDENVGELVKRFGILHGYPCTATQFIPNTDVSQPELFATTSNCLRIFRYHPSSASISQECELSATKSSAYSSPLTNLDWNEVDPSLVATCSIDTTCTVWNIETNQPIGQAPSIKGLQKTQLIAHEKPVHDIAFTRLDNGRDQFATAGADGSIRLFDLRALQHSTILYEDAERRMLNHLSWNKRDPTKLATVAQESKEVVILDVRVPCRPMAKFGNHRAAING

SEQ ID NO: 162265 - protein, 98 aa, Heterodera glycines
MSTTDVEETIKRIQSQKGVTGVIIMDNIGRAIRSTFDDDTTAHHAALLQQLCERSKNVVREMDTSNDLSFMRLRTKKNEIMIAPDKDYLIAVIYKKSR

SEQ ID NO: 162266 - protein, 212 aa, Heterodera glycines
HFKWYKMSIIDIDAEQNNHSFAVDSQSNNYFLVGRGGDKSILLNETSGNSYAFSNVPTLPSVHYLFKNNKIHFNGIFSYEIHEFFQCSIDNARTLYSIRDLKEFAKACGGGTELIPFFGYALRIVVEAPIELGTDTKTEEDDGQQQKQWGECATFGSGKTEKEAEIIFEKNSQEAPAETFRDEPFFEFVKAIVSNFLDWGTERFRHGRRFAG

SEQ ID NO: 162267 - protein, 144 aa, Heterodera glycines
MELRLLFASLFALWAVTAAMRKQGVAISGKFVCGHAPAMSNSTKVRIVDIDTGPDPDDTLDEKFVDAAGAFKLNGYTRELTDIDPVLYVWTDCNDGHTPCHRKIKFLIPKTKIIGEDPKANDWLDIGVVNLQSTFEEEKRECIF

SEQ ID NO: 162268 - protein, 108 aa, Heterodera glycines
MPVKIETLKAGDEATYPAVGRKVVCHYVLTLENGQKIDSSRDRGKPFEFTIGKGEVIKGWDEGVAKMSVGQRAKLTISPDMGYGAKGIPGTIPGNSTLIFDVELIAVK

SEQ ID NO: 162269 - protein, 91 aa, Heterodera glycines
HMDIPIFPVRVPPNGSAMCEQTKRHSTKSTYSQCPAALSSQYFSAHFAFPIRKRVSSAGSIAASSSSTPSAGPCQQLSMSGEVSEQRDGFA

SEQ ID NO: 162270 - protein, 96 aa, Heterodera glycines
QKKVIACEFHRIHHMLLAICSFHRLFLCFSSRRSFLQNSVFAFLLPHLPLGVLLLLVFRRLRFVRHVQPKQTFTALSPVGHANGFGAFNALPHVAE

SEQ ID NO: 162271 - protein, 202 aa, Heterodera glycines
MTANLAMALDEIIKTQVKAPRASAAGRSVGSGRRLAGATTNSRFRFLQRGFVSGDVPAGQWKHDKFAELYGGGKKRMGGASLGPLKAVKGGAGSSIGARIARNAIERNSGGMVKLQVSNLPGSVVTLDLEELFQDFNVFGVAVHYDEMGNHLGTADLFTDQQSATNILNEFKNIAIDGQEIKFCLVTEGADSVGGKRGNIRD

SEQ ID NO: 162272 - protein, 210 aa, Heterodera glycines
MSEANLQQQTHGPIAGTDYDSADEYVVIEQEEETDLEKNSTLPETVATNTNSTPSDVQSVAASVGTLDAVADIGNGLDGAKLSVSSVFPQNAMSGSNYSQNGFNSSIFGSFVMEDQLRDLVRSENEQNRLMLDSIKNAIGELTKQKSNNNELNALISQQKKSLGEALTKLDNSEKLSREKDERIVELEQKIQQLSEALDDSAAKTTQLGE

SEQ ID NO: 162273 - protein, 121 aa, Heterodera glycines
SYQFITLSEPSFAAAFFSVLISAWGKAQTDAEQVENWHTKLPARTISIACACRTTAAPVFKLSSSTTADRSFSFEFQHISSIGRAEGERSQKQAAEDDWKKLGNHFWKLNFRKRRNKIINK

SEQ ID NO: 162274 - protein, 172 aa, Heterodera glycines
MQQIPILSLSNFLPIFSLISVPFLLSFPSTAFGCSCAPTKFNESMCVAKWVSHVKVLQNTTTTNSHRIFTVRHLEVFKSPNGTAHNDQLIGKESAVWTPIFTAACGVRELDTEKEYLLAGTVDNLGTMQINLCLFIPIEDGQPNAENGIVEWAKVPEGTKARMANWDDEQCQ

SEQ ID NO: 162275 - protein, 129 aa, Heterodera glycines
QFIFFLMTEATKIYNRLSAFQKFRINLNCHLRRVRSNWLYQLSTALVFVTALNHASIYLTYGPDHPRCMQQWKERKQRGLLTDELLWKERLLYARRREFLTAVDGYGTVDNWKHPRATMGASTLSSKLF

SEQ ID NO: 162276 - protein, 195 aa, Heterodera glycines
MSSFFMHHQQKRSHQQAAAVTLADIRWMEPMAATESAATSTPAKRLLARLGTTRVGRYVQQLAIDYAASFRDIVVGMRQRPLRAVACGAALASLVFTLKSNPDEIALRARLAQLRQQMVLIPASIHSTRADERLEQYTVLLNGNRLELVDFLLFSVLVERPFDKKNDFYAAHDKTLRGWPWTELWRNAWDIGAFG

SEQ ID NO: 162277 - protein, 79 aa, Heterodera glycines
QMANEILEFPLKYDNDIHYLKVRRTDTVRELKFVIEAKLKIPPEEQRLMIGNCVQPDTRLLSSMKGLDLVRETGPAAPP

SEQ ID NO: 162278 - protein, 148 aa, Heterodera glycines
MSSRRGGGNNVEGKVYVGGLPEDATSEELDDVFHKFGRIRKIWVARRPPGFAFVEFEDTRDAEDAVRSLDGTRICGVKARVELSTGRSRRDRDDRGGGGGGYRSGGGGGGGGYRGGGGNRDYSRSRSRSRSPYQRRGGGGGRSRSRSR

SEQ ID NO: 162279 - protein, 266 aa, Heterodera glycines
  unsure (1)..(266): unsure at all Xaa locations
DLQKNLIATGVMPKTIVLFDSETETIKNTFKGHQKRISAVRLHPNLQTIVSGSFDSQIRIWNADDQSARNVIGIHDRLFFDVSLHPTGDYVLCSSEDSHWSLIDLNAGRPLIKVKSDDDDVPGICCGQFHPDGLIFGTGGKNSVVKIWDIKEQINVAQFPGHQEAVVAISFSENGYYLATGSTDGEVKIWDLRKLKNXFDQSGAYLAVGGSNVQIFQAKSWNNIAQFNAHSQPVTGVCFADDAKSVVSASMDKSVRVHAVPPVANE

SEQ ID NO: 162280 - protein, 88 aa, Heterodera glycines; identical to SEQ ID NO: 157977

SEQ ID NO: 162281 - protein, 133 aa, Heterodera glycines; identical to SEQ ID NO: 152027

SEQ ID NO: 162282 - protein, 226 aa, Heterodera glycines
MMQQQSTQAQHSNPSQHLRNTPQSPAATAPPTSSQSQHFQQRPHVAYHQPPQQHYPLQQETNQSQHIRPQPGVRPAHPQQHPTEQQYPSMAGPLFQSQPSSVQALQEHEIGNVGQPRLAQHGHTHISHQQQVMMGQRHATHHPSQQQTLISQQQSQHPQQQHPTTAIRIEQSGQVVHMHAAPPAPPQHQTQRIFVQQQQQQQMVPTLPPQSAHDPSLHPPPLPHPH

SEQ ID NO: 162283 - protein, 154 aa, Heterodera glycines
LFQVDPLMLSNFSLILGGFATAFAPFLSRLWMFALYCFPFAFGAASFAALRSIICVELLGIDRLTSAFGMLMLFMGVAALLGPPFARALKNWSGDYGLAFHIMGSLMALSGFLGIPLRRINEWECAKERNRKMIEDEGETQGTKNGRKSGEEKQ

SEQ ID NO: 162284 - protein, 182 aa, Heterodera glycines
AIFDHTTSSMNTFHPSAYVCYIRSSLFFCQFLMASAWSAADRSAGAALLLPLLRRAHPSDDGKAVKCPAEEFPAEGRRAEGCHWVAHSPLRRRPLFVQSPCFCPLFWHVKCCLVFFGLCFRHPFLRRRVLFYRPPGAEGTRAEEARTTDRWDMANRRRGRGERRKRRVPTKERAGESFGTEN

SEQ ID NO: 162285 - protein, 106 aa, Heterodera glycines
NQQKFRHAHYLNFIMLTTRMICFLVVFMPMITHFSNAGQYYYPAYYYNPYYSYYGSSASDNNPYYSYDASSGSWKLRSSSDDSSSATYNPSYYYMYYYPYTYGGKK

SEQ ID NO: 162286 - protein, 239 aa, Heterodera glycines
MFAKHLRNFPFGCPFAARPLRRYSAHGLQVHRDNERNNPNTPFQFTEANLAKITVLLNNFPEGHKGAALIPVLDLAQRQHGWLPISAMHEVARVLEMPRMRVYEVATFYTMFNRDPVGKYFLQVCGTTPCMLRGAEAIIEAIEKKLGIKKGGTTADGLFSLQEVECLGACVNAPMVQINDDYYEDLTPRDIEEIIDEFKAGKRPLPGPRSGRLAAEPLAKQTTLTETPPGPGFGLQQGL

SEQ ID NO: 162287 - protein, 239 aa, Heterodera glycines
MINLSISTNKTEFPYLVRYPATMALVEFKVKLELVVGIYSADMKLELRSHEGKFISELIGDDRTLEELGVRDQCIVNVCDTSETRNDNSTNDPNAFYVIPEERYANRKDTARKWKQQLMTTATTTTDVERSEQQVPNKIGPGKRCIVQLRDQPPRKAQIAFVGPTHFGENPGTTQWVGVIYDEATGKNDGSLDGHRYFRSEPSHGGFVQIRAIVNVLDDVEQAANDKEQIQQQMEIEEI

SEQ ID NO: 162288 - protein, 165 aa, Heterodera glycines
MRFTSIPLIFCLIALVCVIASVPELPQKFLKSWSVDHSENFDEYLEAKGYGWFMRQVVKLAGITKTFSKNENGTYACKIETTKKNVEWPSFKLGEEFQAEYLDDSVPKITFDYNPTTDELIETHKKVDSEEKPDIYKYNIDSDGFLVMQMEYNGVKTKRFYKKNE

SEQ ID NO: 162289 - protein, 73 aa, Heterodera glycines
PHLLHIRVKDIAKVPVVVLVDQFLRGNELIFVHFELIRFHLHQTVFGIHKFRCSKHFRIKKAFRFILTMGLIG

SEQ ID NO: 162290 - protein, 135 aa, Heterodera glycines
VPHLPLATVSAAVTVSPLMTPNAKLELCCQKQQLPSTCQQFCNFDTFTQEKLLIALLGSHCPSAQLSKAFDCATSKVDHSECCRQEGIDRIHNGQCMVFCRTHIKTPPNVAGYVSCLSVFGTIKNCYRDHQIKHK

SEQ ID NO: 162291 - protein, 160 aa, Heterodera glycines
MTSRILRLWQPGAPRPRVFLPDFWIKLVEQPSKGYNRLPKNAAAFEVDLKMSRMDVREYLEKIYKYPVRDVRIRVTMGDITWDHPKDRDKRRALWKEEDRKIAIVFFKKGFIAEVPDLFPGRGTDAEIDQMKKFQEQDANTFNSRFVNRGRAGIGEMLPI

SEQ ID NO: 162292 - protein, 112 aa, Heterodera glycines
MSSSAMGTQPALFDRSNISFAVSFLAGGLAIGYLLGWRTAASKLARCNTRVQLSKDKVVDTVELEDIGEKKAYCRCWQSKKFPLCDGSHNEHNKKTGDNVGPLIVPKAKSAS

SEQ ID NO: 162293 - protein, 252 aa, Heterodera glycines
MSVGVLFRLTIRPSPAGLRLTCFLATNYHHNLHQFNNNCLVRRHFSCTSRLLLATTTDNKGDAASAKQQQFAKIELKPKTGSDGAVAEPERTYLEEMLIERDAEPKTAGQKVKRAVETTFYISFGLISCAVLGVMTYLVFKEFFAFNTPQGVYRDAVKRVKADERCREMFGKRIMTFGEESGRGRRRHILHNKYVKDGQERLSVMFHVKGDAGIGKTYAEIYKGEDGKWDYRFVLVKSDGVPKKAIFLIDNR

SEQ ID NO: 162294 - protein, 167 aa, Heterodera glycines
MPTFAELFELSATDVVLVVLFVYVVYKLFFARRHIPPPPDVPQVEPLEKQDMTVEQLRRYDGVQDEHICMAICGKIYDVTKGRDYYGPEGAYGALAGHDATRALGTMDVKQIKDEFDDHAGIDPSDLEEAKEWQQRLSLKYPFVGRLLAPGEQHTEYETVAENREGN

SEQ ID NO: 162295 - protein, 196 aa, Heterodera glycines
MMEMANTDEINLVTVDVPPNCHFTVYVQKPRENLEGKTVFLTVHDVGSTSQSFIEFVNSSPMNSVKNHAMFLHVCVPGQEEDAPPLDGDFPSMEQMGEHLVHVLNAMDVQNCVGIGEGAGADILCRFAMAWPNRVLGLVLIHCLATSHGIIESLKQIFLNLRVEDGNMNNAAWDYLFLHKFGLHEKTLKEAFIAEL

SEQ ID NO: 162296 - protein, 42 aa, Heterodera glycines
FFFFFFFKNFIFYIYSRITAMHIAYQYCIITCHRILINLLKK

SEQ ID NO: 162297 - protein, 182 aa, Heterodera glycines
MSNPSHSQFTMLSQIGSGSFGKCFLCKRVADGAQMVLKKVRISDESKNEARLHSLILHPNVVRTFESYLSQRSIYIVLEHMAGGNLHEHIKRNEAEEFKDEDILSITAQLTAALEHIHQLRIIHRDVKPRNVLLSEDWRTVKLCDFGIAIKLADGQKAKGRFGEVGTINYMAPEILEGREYD

SEQ ID NO: 162298 - protein, 306 aa, Heterodera glycines
MLTHRKYRLLQFASVSGRALTISPEFRQLSSVSSIPSNSHKTSKSDGKAPKSSTLWLNLPSNAEEDVRTRVRSSFFGTYVALLFPAATFALGCWQWKRHKWKTELIEKLKIATKTAPVEFPVDNLSAIDDMEFRKVHVRGYYLFDRQFVIRWRCRLDPANTGTSNSEKYGAYVITPMRLEGTNVTIMVNRGWVPNENIESELKKGKQLRESELKDLNAVVRSAEKGSPFVKNHPEKGIWAFKDLEEMARQSDPVPIIVDADFESTEKDGPIGGQTIVVLRNQHYSYMVQWFGLTVGVLGMWALRFL

SEQ ID NO: 162299 - protein, 327 aa, Heterodera glycines
MMSNATKNILGTPTIVDNVSFDPKVSANFLHKAIEEKRKDEIIHLLCTISNQQRQELAREFKQLFGEDLSAKLKKALSGDFEELILALLEPPAVYDAQQMHRAMSGLGTLEGSVLIEILVTHSNRQIDEMKRVYEQLYGHPLEKDIVGDTSGAFQRLLVSLCNDSRDESWSSDPIRANMTARALFKESEVESGVNDVLFNQVLANENFIQLHLIFEEYQKVSGHPIEQAIQQQFSGDTRDGYLAVVECVHNRHAFFAKVLQNSTKSFLGIGRRDSDLIRLIVTRAECDMVEIKEQFMQMFNTPLEKAIESNCSGPYKDGLLTLVKGN

SEQ ID NO: 162300 - protein, 167 aa, Heterodera glycines
MNGKGKNKKTSSYKERKAISYQQGSDPPFLAQFKNKLGYKEWTVEDKFAKSDDEEEEEGADNPTDDIRKMREEERPQVVVLDPRTDLSAEELQKEIEKGNEEEDKRKIMEGKIMFRKPEKRKTENGCGKEGSKEEEEKEKRAKREEKPGQQQKEQNRRLLSFGEEDE

SEQ ID NO: 162301 - protein, 71 aa, Heterodera glycines
VKGRLTTITKKQQQHFVPPFPRSAEFSLRPSAHFFACLRLRFSRRIRFLRHFARIFQCQKELKRKRGSSNL

SEQ ID NO: 162302 - protein, 220 aa, Heterodera glycines
MTKPQQVLVLDPNNELSFKGPFTEYVNANLTLSNPSRKDVYFKVKTTAPKFYCVRPNSGVIKANDKTQINVMLQPVESPETLESERSRHKFMIQTAFAPDDEQLPVDQFWKTVDPTLVMDSKLRVVFQRPFGFGDENNRDETNATGPFFNFNKTGEPKNEQPTQTPKSTEANSGDIQLALQREVELRMMYQDEKKNLEKENYALIDKLEKLTHNAAAGGV

SEQ ID NO: 162303 - protein, 91 aa, Heterodera glycines
IYETVNPICLFCSFFDTFARYFIVSYLFITLQFVFFIFLRYFLIDLHRYRYVINEFIHLSIISAFYVFPTYLSLTTRKRIECTIRAPHYSN

SEQ ID NO: 162304 - protein, 187 aa, Heterodera glycines
MSSPSSSVSLLAIVTIFCLLCKCCVSAPHPCCPGSQKVVSLMANYVGTFAHSFSKASLCSDAQSVAGALKGQLIGCSKGGDATLLADIEGFLGTHSADECAHSLGFVRAMFVIAASASSHASNNSEWQALSAQFGQQISEIDSKCAEFGIGIAKVPYDGPKGDHSQRNVPGTDSVISMPGLTGSHKQ

SEQ ID NO: 162305 - protein, 206 aa, Heterodera glycines
MICSRLFSSPISSSVCRRSLRRIGYCADPTIGLSSEQIEIQRMAKDFAKKELYPEMDKWDKLGQLPMDALRKAGELGFGAIYCDDAYGGAGLSRSDAALVFEQLAAGCCSTAAYMAVHNMVPWMIDRFANEELKQRYIPELASFTKLASYCLTEPGSGSDSAALRTNARREGDHYIVNGSKAFISGSGVSSVYLVMMRHKDAPPGP

SEQ ID NO: 162306 - protein, 232 aa, Heterodera glycines
MLSKKLIAFCSDTFSGKGLSSRRLISFDLSDQHKAIQDGALKFAKEVVAPKAAEYDKTMAFPWDIIKQAHQLGLMNPTIPEKYGGPGCSNLETALIVEALSYGCSAIQLAIMGPSLALAPLLLAGNETQKQKYAGMLAAEPLIAAYCVTEPGAGSDVSGVKTTAVLKGDKWVLNGSKAWITGGGYAKWFFVLARSDSDPKTPAGKAFTAFVVDGDTPGITRGKKEINMGQRC

SEQ ID NO: 162307 - protein, 189 aa, Heterodera glycines
MQNLFPGKFGQAAQAANTAQMQMKAEHDPSAGFPWWVRFLAKGLGIVGGFVAIFFGVLALFTIHPMCMVAALLQLAAGFLTIALEAPFCCAFVDFIERIAQFSESRAYWQKAALYGGMGIVPILLCAGTETILGAGMICASGVAYGFMALGKKADRTTMLGGANTAGQDPAWSPQLNQPFPQPAGFNQP

SEQ ID NO: 162308 - protein, 231 aa, Heterodera glycines
AFANNRLNLRNETEQNFPLNLCRPFASPPPKWTLWRFDCRDFPNHCTVKTCAFCAEVNKLRPTAKNIVNETHARWDSMKREKSFDDAPTLLRMATDTFLPSKLTKSVFFNHKLGVAIFRDEIPPKFESVENLSGGIFQLYFHGTSGRQSAVTVQKLDALFIQTVRSLFGMPSPIACHVHGLFYRCEINPGNRRDPISYGNLLDLPFMAKFEVPLCARNFLIRQNWQKSFKL

SEQ ID NO: 162309 - protein, 194 aa, Heterodera glycines
MATSSNSTTTVAEPLPTKTSMKIAELRSRVLIGDLPADFLRIPPVSSSVNLSSAPDQIVAQQPQQIVVPYGHPYAFVNPAEHFYSFVPPHTRGRIAVKIVEAKLTKSYGLPGVRMDPYVRLRIGNTLFETPTCVNGGKSPHWNRTVNAYLPDGVESIYLQIYDERAFTSDECVAWAHVIMPPAIFNHETIDEWY

SEQ ID NO: 162310 - protein, 215 aa, Heterodera glycines
VQLRIYAIPFTPMKKIDCHPPMANSGEHSSRRQQQQQRHPNTTAENNSDIEGTAHRVASVTLNTESDSRTSADLPAYPFRSKRRKKLPRRDKQQGADMDVDEHQPPWKKLSVNTVDNLTLPSCKVQMDWEHGHGQALSTANDSTQNQSSSTTRQASDMENSVSDQFSHSQSESEASTSNIDADDEQSDWPGNELARHPQLSSSSSVIVPFQLAPP

SEQ ID NO: 162311 - protein, 147 aa, Heterodera glycines
IISQLLVDLFCQSIVPVVLTFPSFLLSFSFALKNKKCDENGQKCRCESAAQKAVVCPRSVAQFARAIGACQLAARPAKHRHGPRLARVHSPAAQRVISRPIPVFAVLSVAICHFYRALLLLNFGAYVEQTHRHIGAGPAFESIGRQK

SEQ ID NO: 162312 - protein, 194 aa, Heterodera glycines
MADCWDDEDYDPSAQMADKIASLGLDDVIRQQQPKGEKVPTQATNNSRKEGTAKEGATELSEREKREAQMRADGTAAMDLFGLAVERKEPTFDDLRTKDDFQAFADKLGEQIGARNDHANYSLFVSALVDHMTKPMSKLQLQIVMAKIQAHLDVHLKREEEEQKLQQEKTSKKETKKAKKKELEEDVIEDEYDD

SEQ ID NO: 162313 - protein, 112 aa, Heterodera glycines; identical to SEQ ID NO: 149250

SEQ ID NO: 162314 - protein, 148 aa, Heterodera glycines
VKFLHFFRLYLIMNRGRNNQNYLIHGISKYWQVVGALGLCVVMVCITYQLFLHVDEKHKSFKLMISGHFNDIKQINNDFTAWSKNFTSHLNERFEQQQARSRARFKQQLANFVKIRLDFDKQFQKTMYRFAEVELETVLNKSKASGGG

SEQ ID NO: 162315 - protein, 61 aa, Heterodera glycines
MSAVQFKQSFDKVCATTANAFRFSLQWCFVPLVVILGFRRGAEPLPNGEIVPLSIASLFWG

SEQ ID NO: 162316 - protein, 151 aa, Heterodera glycines
MIVNPIRNIFVRNFACQFGPSELARSYVTDGPLTVSGRSAPVKKRTNAADEIARTKFELLEPIAVTDLPRAQQRFARQIHRSNRTRVQKIFAKNIKMIKNGLAGIALVVAIYLYTFFVMRKETFLEEIDEEMAIERGEMKLDDQGRLVAVK

SEQ ID NO: 162317 - protein, 248 aa, Heterodera glycines
QLLLLLLLLTAHRMSNPKRVRLERLHALDFGESDDISETQSLDGSAITFANLNTVNAKNQQRKKMNNRDHFELELSAESDHRSPDKSSKFQRMPSSYFSDAKRIIDYVLVYEEKEMTNSNYNNNCDDNKQRDNSRSSPNGTHKNSCFSAPSECPFLSRSSCIGTALTTFHGCQCHRRRGERQRKGRRDGRRRAASAQCFPRKIGSFIQCLAQSADQIGGPLIAFPQNFEFGGDFNRTDGTEINGQFQR

SEQ ID NO: 162318 - protein, 101 aa, Heterodera glycines
LKSFKMAIKLEFAGGPDAIFNGKRETEAENDNISTVRQLLRWLSDGPLRGNDRSEMLIQRDTVRPGVLVLINDTDWEILGGLDAQLNGGDKVTFISTLHGG

SEQ ID NO: 162319 - protein, 180 aa, Heterodera glycines
MAETAETINTTISSPPPESESSTTISAMTDPTSQEAASKDTDLTKEAESEKKPGGISLRIWPPTQKTRDAVLNRLIETLSTESILSKRYGTLKSDDATTVAKLIEEEAYGVASNAVSSDDDGIKILELYSKEISKRMLESVKARSNASVGNGSVEDANTDASEVSKDDAGPASEEEKSEA

SEQ ID NO: 162320 - protein, 211 aa, Heterodera glycines
GNNQGGFHKRERTGDGSQRRATGGGTIQILSSSSSSTGSHQTPLQGQISSSTDDGCPVQMKIAKPDLMAEDSLEFAHNEYPVVFKWHSDAQPAKHVYLTGSWDNWRKKIPLVKSTHDFSTIINLNPGRYEYKFLVDGKWMVDDTIAKTDNQMGSQNNVMSIDEADFAVFDALDKDLASSNAGEAMRSMNSTGAQPSQDTPNDRELERLREF

SEQ ID NO: 162321 - protein, 201 aa, Heterodera glycines
MPTFPWSKKRKASDDEVVESGMTVRQILEEREEYVKNIGIEYRFGCYEEKRADSCQYLGEYFEAVQTDFKSAFDTFRQNCEQRKFPRSCFKYGQYLAAGRACEASFKKAIEPLRLSCDAGIAKGCRVLALILWNGESDRPPDSAQAEQFMKRVAELGDYEASWTLSTWYLGDTIKYQREKSAPYGHKMGELSRDMQKALMY

SEQ ID NO: 162322 - protein, 175 aa, Heterodera glycines
CRPFEPFDLFRFGAVNLDPLTETYGLPFYLHYLVNWPDYFMVAEHLSGDLMGYIMGKSEGRDQNWHGHVTAVSVAPEYRRMGLAARFMQKLELVSEKEDCFFVDLFVRISNETAINMYKRLGYTVYRQIVDYYSGDDTHEDEDAFDMRKALPRDVDKKSVVPLKHPVSCNEIDFD

SEQ ID NO: 162323 - protein, 91 aa, Heterodera glycines
MHLIIEIWKKGLKWGRKGGIKLKMNVYFFGIHPEFFFFFFFTHSLHSLFTTAQNALIPSAATGTDVERCFGFLPAFVHFLVVPTGHLFIPI

SEQ ID NO: 162324 - protein, 118 aa, Heterodera glycines
  unsure (1)..(118): unsure at all Xaa locations
MFLKFLILAFCFQLAMANLFGQKQSVAVVGMLKCKGKPSAGTKVKLYDNDHFTTDDLMAQSKTDNYGRFKLSGXHKEITKIDPKLNLYHDCNGDFPFTPCKWKITIKALDGSRAHAFS

SEQ ID NO: 162325 - protein, 80 aa, Heterodera glycines
MVRMTPDECRSIASEGERSLREGDAVNGIKILEKALQCNTFDLSLQCSLHSQLGNAYYARGDYRKARFPSTVRSFYSPTH

SEQ ID NO: 162326 - protein, 72 aa, Heterodera glycines
PHLLHIRVKDIAKVPVVVLVDQFLRGNELIFVHFELIRFHLHQTVFGIHKFRCSKHFRIKKAFSLYSNYGLN

SEQ ID NO: 162327 - protein, 232 aa, Heterodera glycines
VATIKVSSSSAHQLHNNASIINIDTVRFTSHSKENDTENSNGSDFTVNNGGTFVRRKDPVERKVQPNVNPSSNPSSSFTSHDHYPPVVSDGDETADDGTGTIRIISPSKAVPPIPPHHFHRQQQQQLQHNQVNNVPSTFVADVSVGIAPPPPTIRGVRCSSLENTLLPALDKLTRTRHGAAHLDTIAVALKRAEQASPGLCDHLVTELITTMAHPQCTNAELRKAIDRLTTR

SEQ ID NO: 162328 - protein, 195 aa, Heterodera glycines
MSSGIIEFAVARGLHVKSRETAVPYLRSSIRRFPVDEQRVPWNVPLVDYSPCDYTADSVHGKPWADPSEPSKCKFNSMDDGVNRVSFHGSYNLDTDGRPLNPFGRTGLRGRGLFGRWGPNHAADAIVSRRLANGQLQFVAIERRDTGELALPGGMLNKGEPPTEAAVREFSEEAMGGHRREDKLEHFWKKGKTVY

SEQ ID NO: 162329 - protein, 291 aa, Heterodera glycines
MQETQIIVGVASLCSILAILATVVVVPSLYSEINEIATKVHDGVQAFRVDTDSAWTDLMDLQITVTPPSKPRQNPFSSIFRQKRQLPGHCQCAGVQQPNCPPGPPGPAGSPGQPGQPGQPGGPGQPGVPGQQGPPCPVYTPPCQHCPAGPPGQPGSQGPQGRPGAPGQPGQPGRNSGQGPPGPPGPQGGAGQPGRPGGPGQPGQPGAPGVITTSVPGPKGPPGAPGQPGQPGAPGQPGKPGNAGQPGAQGPPGHPGQPGSPGQPGSPGPAGPPGGDAAYCACPPRNAVLMK

SEQ ID NO: 162330 - protein, 221 aa, Heterodera glycines
MSMRRSRSADLSLISREKYLSRWSRENTPMDCVDRWCSNVRRSFTPVRDISGYENIRNERRSRSVDSYRSPLGIVTVPYHTNVNYYQENQPVRKYDVFQARTWSYPIYKYIYGRDNHYSRPGSYTRVYGQQSLYTPSVMAPEAKLATERRTYSGYNYVAGEHSFNLSTKPWSQSNYRFLRVSHISSVPWYFHGQTSNVRHYNSYRPPSFTPRLSTYWKSYF

SEQ ID NO: 162331 - protein, 206 aa, Heterodera glycines
MHSPLFGSMLDNKEYSRHIENFRSSISPPKGITNGLHCHDFRSPSDFDVLVKLAKDPAGVGNRELQQRMDQDQQFRQQVLCAIVNGGKERFLQLCIDCNGCFVIQKLVENGSKETNQMLLNLVRPLAFKMVLNRFACRIVQKLVVNLSGSQVRQLFCQQFKGHENTLVTDQNGNHFVQCVVDHFAPDVYGPFILALANCPTRLSAV

SEQ ID NO: 162332 - protein, 80 aa, Heterodera glycines
MMSLLASNNASSNGTNAAAVAPLSPLASYKEQQQKHKFKKPNPLDRFLYKVVPAQTHPFTQLCYTALIFGLWAQLGRYMR

SEQ ID NO: 162333 - protein, 171 aa, Heterodera glycines
MSTATDVQHKSIYDFKANDIDGHEISFDKYRGKVLLVVNVASNCGTTEFNYSQLKQLYDKYKGKGFAVAAFPCNQFGGQEPGNANEIKDFVHKKYNFEPDLFEKIDVNGSNEHPLYGFLKKEQHGTLIDAIKWNFTKFLVDRNGNVVQRYSPNTEPRDIEADIEKLVAAAA

SEQ ID NO: 162334 - protein, 303 aa, Heterodera glycines
MVFAIRRFVGKCSPFPNCFLLRPSSSFTPSADGNTDKREDAIRLPILPKKSRSAGQPYSLVDYKNVFCKAGKGGDGRVSFLRLKKVEFAGPNGGNGGNGGHVIFQADSKITDLSQVHSILNAQDGVEGRGDCAHGKCGEHLYVPVPLNTLIKKPSTDELRPSKVTLHELCREGDLFIAARGGAGGHGNAFYVSNLVRKPLKAEEGGQGEEMSYDIEMRIMATAGLVGIPNVGKSTLLRAISRAKPKVAAYPFTTLSPSVGMVQYGDFFQLAVADIPGLVQGAHRNEGLGFSFLRHIVRCECVL

SEQ ID NO: 162335 - protein, 178 aa, Heterodera glycines
MLNHIYNINTTTAATAQQPRKRGTTGTTKHGTMPAPTTTKASGSSERGGGTQHHQFTNGRQVTTGQRRKGATGNEARDRTLASQPPLLPPLTSVYDFKDVVGIGSGAFANVFRARELITAAPAERYRHVALKRINLSAIEKENQLMYESVLNEVDIFKSLSHTNIVKCFYSFTEISPH

SEQ ID NO: 162336 - protein, 199 aa, Heterodera glycines
MNLGRCSICTLSFDLNDVSALKCGHTYHYQCIDKWIANSKTCPNCRTSNLKRDILKLFFDEGEKSFSQLVQEPANAELLAQLKEAQDVKCFLEKTIKEQHERLTLLEFKLKQQKTKGNELNMQIQRKAQHIATLESQLFDQKVLKETNEKYKRRLVVCEFYDLLMRGGGDEGKIDKYINQNGHPDEAKFLDLMRKQRDE

SEQ ID NO: 162337 - protein, 201 aa, Heterodera glycines
MSSVGKRGTRKTTRNDSDGSCNSAEMQDSENNAENERRGESGGAGRGEEDGAFEPGSWECTVCTFRNRYEAFKCLMCDTRKGTSTRKPRLNPSVVQQQTLVQKLAVEVEKAHQNPCTSAMANSPKPSRAPSANGGLSNKQQSKLTIRRRPVPFRDALVVRSAAKKMVVNVSGVSFTVTEFKPRTSPRGRKKLPVNQNNGKH

SEQ ID NO: 162338 - protein, 191 aa, Heterodera glycines
MYNYHLIFLLVALIRGFGLIAPMKIEELNDLDAENFVSKLGKIFENSAWVVQEAYGERPFEGVDQLFNAMERVLMNAGREKQLKLIQAHPDLAGNEMFSGNLTQHSTSEQANAGLNALTAQQLSEFNSLNSAYKSRFNFPFIIALRDQKEGIDGILAAFRRRLNNSEEQEINEALSQIGRIARHRLDTLMI

SEQ ID NO: 162339 - protein, 194 aa, Heterodera glycines
MAKSRQIRIHFGSNLSSNPKKTMAASTPFATSAAPAPSRSKAPLGQATHSVDKNALGFDFNKLVLYLYQTVPQFIAPLRIEKFALGQSNPTFFLVDGREQKYVLRKKPAGALLSPTAHAVEREYKVLHGLGTCGHVPVPRVYTLCMDSSVIGTPFYVMEFVKGRIFPSPALPEIPATERRAYWEAAIRTLARLH

SEQ ID NO: 162340 - protein, 228 aa, Heterodera glycines
EECSKMVTRLKCVSRVENDGKAMGRSANGFVAFGCERKRMGEEENGGKVFYLLLTTRLNKGHPRKIKLSHFYRLFDKMKRNGMATFQFADPNLTVYVSQADPKALCQFLLHLNGLLRHAVDANIRCSAPSCSSPANVPSSPPPIATVSTVHRQCTSAIASAKPTKICIQSRQEYQSMIRQASSANLQRLDIVGIGFRAVDIRWFGMRRLQQLSLAANKLGSDEWCTER

SEQ ID NO: 162341 - protein, 210 aa, Heterodera glycines
RGEGGFLINNEGERFMERYAPVAKDLASRDVVSRSMTIEIMEGRGVGPLKDHIFLQLHHLPPEQLAQRLPGISETAKIFSGVDVTKEPIPVLPTVHYNMGGTPTNYKGQVIRFSNDKGDQVVPGLWAAGECAAHSVHGANRLGANSLLDLVIFGRACAINILSANKPGDSLPPLETDAGESSIANLDSLRNANGDVSTADLRLELQRTMQ

SEQ ID NO: 162342 - protein, 64 aa, Heterodera glycines
FFFFFFFLQSTKNIIIYLYNNDLRYWSSRNVYLSFSLSSVCTVSTMHLRFSRHRHFCSSVAPVG

SEQ ID NO: 162343 - protein, 111 aa, Heterodera glycines
MADSIQNLNKPKDAFEQLEEEEGTRQGFCHIRIQQRTGRKTITTVQGIAPEYDLKKIVRYLKKEYNCNGTIVEHPEYGEVIQLTGDQRQHIKDFLCKVGIVKEDNCKIHGF

SEQ ID NO: 162344 - protein, 220 aa, Heterodera glycines
MDVTSNPNGSVEFEKVPKSLKKGSADTGLDFDEDGLTIHELFSQGTGLTYNDFNILPGYIDFPVSDVELGTHLTRKIRLSAPLVSSPMDTVTESEMAIAMALNGGIGIIHANFKTTQDQVAEVLKVKRYKQGFISNPQCISETDTVSDLRHIKRIHGFTGTPVTDTGKVGGRLIGLVTSRDIDFIKRENYETTRIADVMVPRERLIVGHKNMTLREAYCI

SEQ ID NO: 162345 - protein, 143 aa, Heterodera glycines
MPAPQQSTDEQAEEDATELKFPKEFEVSSCDALMISEVFLLLDHRRKQSEEKEEIEDISEVFLKTLNYTRRLSKFKSRETIRSVRGIFAGKHNMHKFEVAQIANLCPETAEEAKALIPSLENKMEDEELDELLKELHAKKTFQ

SEQ ID NO: 162346 - protein, 210 aa, Heterodera glycines
MFKFAKPMTTTAARMIARKSRLEVMPMAKKYTESDYQRELTYRRSDYSFPAFCESDVTHFKRGEVHHKLMQGGASEGGFTLTAYVLVALLENHVQNKVTELARSNLVSHLADFKEDPYALTLCTYVLHLANSPEKGDVLKMLEGLQTTGTTDGMVHWTTKVSNGAKDGSGGAAKNIGDVAWDTNQYFSQPQSADVEMSAYALLTYMLLDN

SEQ ID NO: 162347 - protein, 96 aa, Heterodera glycines
  unsure (1)..(96): unsure at all Xaa locations
MELEPFVNKCVSIITGDGRNIVXDCMKGFDQTVNIVLEDSHERVYSIDSGVAQIPLGLYIVRGDNVAVIGEVDETIDKQLDLEKMKAPPLPAIWIP

SEQ ID NO: 162348 - protein, 143 aa, Heterodera glycines
MNKLFGLLMLFAALLAHFIDCRPIRSSKRLVKVGVQLDNSEKTASASGNTYKLEFTNLSYKLVCQVKFRIELPQTATLDEYWNINPIGPADDHLFTLPVEQMYPGRSFTSARVKLNGVGEPKVTIMDTVDVLSTKPCPTVPNF

SEQ ID NO: 162349 - protein, 53 aa, Heterodera glycines
VRAKFKNDDGEKPIKWRFWRDQKKLKLICLILHLDSVRSIAPRHILPLPSPTK

SEQ ID NO: 162350 - protein, 222 aa, Heterodera glycines
  unsure (1)..(222): unsure at all Xaa locations
MSFCRAPSTFSVPAQLFVDNRVRLVKALREKLGGAAPGTCVLLQGGKDNPRYNTDTTDSPFRQESYFFWAFGVHEPEXFAAVDVESGKSAIFPPKMSPDSAIWDGKIQPEKWFLDKYKVDHVNFQTNGAEIGQFLHKLFNAKKLLLLKAENTDSGNVLEPAKFPGMDSFSTDLASLYPTMAELRVIKTELELAVLRYASKIANEAHKEVMRHVRPEMYEYQL

SEQ ID NO: 162351 - protein, 132 aa, Heterodera glycines
NASFEKGIRSKDHHQSHLFLMGVASADDDSVPDPIVIKLGESLSLSQLVQKIEQLQNRTVRELLVTLRRRTYEMPVGPPDPNGDRFFQNGHLLVEDVVYNWVRKTRNSIHGIVQLHVLYEGIAMLDEVNYHF

SEQ ID NO: 162352 - protein, 177 aa, Heterodera glycines
MDQLEVFLSEHPTVEERELFTTYSLAGRLLRPLLPRDENHRRLVYFTEELNSTDYFFSDGQNGRFCVVSLRLMRADKRQRMREYFNENMAVFSETYDCSFGFHELEAMEWDVAVIKVYREHMARCWNDMMGQLLYVVNMYDRGLDPVDMVRTPSAGESSNNGSDQSDVSHNDPLPSV

SEQ ID NO: 162353 - protein, 139 aa, Heterodera glycines
DTFLHHFDVNTVGPVMTTAAFLPLLKKAASAGEFARVVNIGSSLGCIGQAAVSPRLSPYQNVAYGMSKAALHHFSKMMALDESDIVTVAIHPGWVKTEMGGANAMMSVSDSVAKIMARICALTKSDSGKLLYREKELLP

SEQ ID NO: 162354 - protein, 189 aa, Heterodera glycines
  unsure (1)..(189): unsure at all Xaa locations
KTKISFAIMANPSKNIAMLREARSSPYIGGGGSVGTLPPDALPASGPMHTRLQRNRRPDSATAPNTARLQNAASAEHFEQLKELIQFSAGSSSSTSLIAAGRHFGTEQSIENYGRLKAESVXQFVGGQRHLSDQQHRSVHFGKSRINHFNDSHRGEHEPNSDGDDQFAFISQAALFRDQFACAGRRCWA

SEQ ID NO: 162355 - protein, 272 aa, Heterodera glycines
MAQSAEKIVFVRGADGDDENGDGSEIKPVKTLLQALRLSHGTSEVDFLRVSVSSKEGQKQWEKPSKSAMKKAISRLEEERRKREKATNSAAAKLTEEAKSVAEQQQEMAREKRLEEAKKMQVKLDESLPEAKRTKIRECPALCGQRVKVFAFVHRMRQQRKNLMFLVLRDGSGFLQCVLNGTLCQTFEALTLTTESSVCVFGQINKLPIGKVAPGGIELTADFWELIHGSPPGGVDNVLNVEANVDVKLDNRHLVVRGENCSAILRIRAAVT

SEQ ID NO: 162356 - protein, 171 aa, Heterodera glycines
MKRTLRKIWICNDVLMDILPFFDHAQLGLKLALISPHFDALVDTHFDGKSDLTIWRRITIWGFGEPKIIVERKSEEFPLPDRPLPSKIHFKDLHIRNICSPVCEFLRSNRHIFDKGINLRLDMDLPASVQRVVSRPDWHFLVQQMLPIFVPNIRHLELIGCGSIDMLFHIS

SEQ ID NO: 162357 - protein, 64 aa, Heterodera glycines
FAVRPAAAIRPGPKAPSYRPPPGKFAIFMNIYNDPFQWSFVKSALGFCVGICAARILSEELSSV

SEQ ID NO: 162358 - protein, 229 aa, Heterodera glycines
MILQFPFGDFNVLLLLTISTVLLARCLGTIVQFEDELELMENTGTADESADGPLGAFWEWHRMVAGADKFGSISQRMLHLRPSLKVPSVSKRIAFPSTAFPNPNPNNAIPPPNVVRRRAHNIPRDKPPCLRPMDRPFREHRTYPRSWEMPGFEATIPRQWDWRNVSGTNFCSPNRNQHIPVYCGGCWVFGTLGSLQDRFNVARKNRWPMTMLSPQEIIACNGRGSCNGG

SEQ ID NO: 162359 - protein, 142 aa, Heterodera glycines
NIQKENDFVLISLFLGIERPVFCLDWHGTFTAFHLLPNRLQKLPESPPAPRAADSHCLRCRGAMPTALAEPMPGAASGTTPWALSRGAQEAEGKMIRAMAAATSSRKANIEGNEGRHILLIGRRDILLWIFNDKIRTKIISN

SEQ ID NO: 162360 - protein, 212 aa, Heterodera glycines
MDRRFTVFLVIALVTSIYEVLSNGNLNDGDDSFKQFDELEENPAHKYSKEAQKGFEMEEEEVTIREPSGTKESFKLPINMPPVKFSFCVSCGYRQAYEQFAQILREKYPGIDIHGENYPPGILRTVGAQVIGMVKIALIVCVVSGRSPFPTLGLETPTFFQWMLSNRLSAALMLFLFSNAIEGMLQSTGAFEIYIESERIWSKLESGRVPSP

SEQ ID NO: 162361 - protein, 203 aa, Heterodera glycines
VQSSFEFKHNFQMTNEITPNTTFGDITSDRVFYRPTFVTGDQMDLSLAALALREGSKSPTESVCSFDLMSAVGEDGEQNIADELASNGTAGEVEEQQQHTKQNNKQNNEKKCFAILKVRPISVNSTAAHCPNLKFEFVSKNTADNGTTQQQQLSTAASSSSSSAAASSADEVPPIAPSVGQMSVDILSRHFGLTWEQLMAQFV

SEQ ID NO: 162362 - protein, 209 aa, Heterodera glycines
MNSQQLDDLNSCLNQLLRTIKEDTSEFPPSDLLDEIKQCLDFLANSPKILAKQRAEYISLSWPADLRVVLNRLLRTFNIPEEYVKLCFELSYCAAQSLGADWLKSSDKQFLRLLASLSSCRLRILLDKPEEIDMAQLIACLQLQEYFCGCVEDEQIWMSDDDATFVSKCCQEAAALCLFLHSRLCPSIVRHHFANGSFLCPLSFHLCFP

SEQ ID NO: 162363 - protein, 171 aa, Heterodera glycines
MDYANRHTCCWGPFRTRIETGTTVMALFGFGLGILSAISSYVGFHNIYAGMVYLASSLFYLSVIIAMKKKEPSLFLPYLIFEGIGLLCAAVISLTMFIFGIWSPQQAFSTKEQEMNFRSLMLFFAATVGIDVALNAWFYSIIYRTYNLLKKTTKLVASASAVASARVPPPV

SEQ ID NO: 162364 - protein, 189 aa, Heterodera glycines
  unsure (1)..(189): unsure at all Xaa locations
MTLRNDTPMPPDEELRVPHEISLSSPWLRAVAVYMGIACEKEAKEFMLLRSERDNDPRKALPXGRAVTACAINFLRKMRRECGDEIRDYANCFHRESGRMHLHQCRRAQFPMDICADEKLGVRRPMVGYFNKLHVHESAVPPPDPLERQKLYRDYKAEAAKLLEELPEDWKTDPKSVQEVPEQLRFRRV

SEQ ID NO: 162365 - protein, 206 aa, Heterodera glycines
SDIQKAIQALEREYAEQKELFEKWKEENASEADTEPYNAYVEQFRGWEKDVMDNLKELRASIARQPVAPEPELPMVDLDTQLNNLLDRVDTPQFIMAFMSMSQQDPTFLAKAFEVVMEECRTTGFSNPIMPQSATIPSLRPVHRLPTPLHQQPPGVPSASSSARHQSARSPGSLYLPPPLQPKAYVQGSSLLGPSRPTSTVSYTQI

SEQ ID NO: 162366 - protein, 360 aa, Heterodera glycines
MAVPQEVIDKIEAGYKKLQAAADCKSLLKKYLTKDVVDACKDKRTKLGATFLDVIQSGVANLDSGVGVYAPDAEAYTLFKPLFDPIINDYHGGFGPSSKQPATDLGEGKTQLLTDLDPEGKFINSTRVRCGRSLQGYPFNPCLTKENYVEMESKVKAVFEQLKGDAELGGTYYPLQGMTKDVQNQLIADHFLFKEGDRFLQEANACRYWPTGRGIFHNAKKTFLVWVNEEDHLRIISMQNGGNVGQVLERLIKGVKAIESKVPFSRDDRLGWLTFCPTNLGTTVRASVHIRLPKISAKPDFKSICDGLKLQIRGIHGEHSESAGGVYDISNKARLGLTEFEAVKQMYDGVKHLIELEKKA

SEQ ID NO: 162367 - protein, 112 aa, Heterodera glycines
MSPKSSHVNYDLLPEVSHTFRSPEPRPSVLVSDMFSVLCASPLIILFLLWLRIGINFGKFKFSLSALGFHLGLCAVFGLYVFFWLELNMFQTLKWLAVIGVPTLFLGSRLSF

SEQ ID NO: 162368 - protein, 207 aa, Heterodera glycines
VKLATASDDATARVWDFARCAEERVMRGHGADVRSVDWHPTKGLLATGSRDSQQPVKLWDVKTGQCLATLHDHKNSVMAVQWNRNGNWLLTGSRDHVIKMYDVRMMREIRSFRAHKKEVTSLAWHPVHEGLFVSGGGDGSIGYWLVNSEKELTLLEQAHDMAIWALEWHPLGHILATGSNDNNTKFWARNRPGDTQEDVFGMTSVGG

SEQ ID NO: 162369 - protein, 154 aa, Heterodera glycines
LSDKGTATETEQARIYWPGSGLRTKSEIEEEFKCARDGKYPQENLEDWSITGKRSLTHKALFHYTDRRAGKGYSDFATTLYYGRPYIWPPVREINRWHFFICVTFALVILVDCKWFVSSFELFRPPKSEAATLEGDSVEFEDRKKTSVSTNGQI

SEQ ID NO: 162370 - protein, 215 aa, Heterodera glycines
MEIEENGKATSSEDSNMKWKTEEDNLSGTAEQTNPFDDPVHRTKCLIQYIRLRKQRAEAEQAKRNAIKKQKMTARATLQSAREEKAAAETEERQCAMKIEELNQEKHQVLAALKAIHSRETERKRKREEQERQRRALAEEQRRKEEQRRMAAQQQPQQQQQQQSLAALEYLLQLKNAQLSAIIASATGENTQLGTPAVGGHSLASSLPPSILSLL

SEQ ID NO: 162371 - protein, 239 aa, Heterodera glycines
  unsure (1)..(239): unsure at all Xaa locations
LKEQQRLRVAFNGFMEQQPSFVPTYKFDPGTHNWDTSEKKRVPAWCDRILYWVKDKNVGIEQVTYESAHQVVLSDHKPVLSTFRVQVKKVDRHEKERNLXSSCCREVDKRQNELLPQITLSNTEFHFSTVLFDQPSLAVLTITNTGQTPTHFSFKPARPEADRLEEWLTITPLSSFIDVGGAVEVTLQILVFDESACKVPKDGAELSSIIIVHLTGGRDYFIVVDAKYQREVKDLISFN

SEQ ID NO: 162372 - protein, 208 aa, Heterodera glycines
ARQEAHQIRGRIRLLIGDRDLELAANPSPTTNEDVNYGFRFISENNLNADDNQQIPNIIAFGRENGEADDDQNENNSEEGREIEQTQNTTGEEEEEDNATDDNVGMSSTESDGQDKMKANNGKGTCKNEDESKPSPTVETEQNKVHQSASETVISQKANANNSEECKESNGENGTRISMKRQRRSHSVDSSPQQKRVFSRKNFTAEDK

SEQ ID NO: 162373 - protein, 128 aa, Heterodera glycines
FFFFFFFFFFLMCFFYCAFKKDYICTFFKFIFIKSFKSVVVVVREASLNAVSVRTFKESNKLANSDLSACFHGNSSARVVHILSHHLLRLPSSFVCFNNLNNSHFYNWFAHFGSNLWNSDYERLFFCS

SEQ ID NO: 162374 - protein, 76 aa, Heterodera glycines
FFFFFFFFLTIQSVYSINKMSTIREGNSVDHSAVSLMANSMRQNVSLRGRVSSKCADFLLSDSTVQQFAFSVFFSL

SEQ ID NO: 162375 - protein, 294 aa, Heterodera glycines
SKIAGEAVAVGTTVSTGKSLPLPPSTPVSSIQPSGILLNKAGKSADRCSVYPASPAPKVLFHHIAVGPAGAAVSTGNNEFLSELPLVEKKKELLLKEIQNKNEREGVIQKKGPTLPPKPTQSDVTPSKRRTERLLSSTSNSASPISRLSKENADLQAELIKAMYKRRNDSGYDDSEDDSEDDSEDVSLVAMKATESGLDNGNQVKNGVISSKTGAGGASSSQVARVVQGRSSTSNSAPPINAVLNEQINNLLSDIQEGKSLKKTRRWKVKENGEVEFVKETQPSEGDSVKEPQP

SEQ ID NO: 162376 - protein, 72 aa, Heterodera glycines
SVLPNNHFYPFSHSNMAVTFADFFKVICAIILPPLGVFVETGCSIHLLINIILTILGYIPGIIHALYIIFQY

SEQ ID NO: 162377 - protein, 249 aa, Heterodera glycines
MPQILDGIKLDFRDVLLMPKRSQLASRSEVDLNREFVFKNSKATYTGIPIIASNMDTVGTFEMAETLSQSNLFTTVHKHYSVEEWKEFANRVRNNSNVLNNIAISSGSRSDDLTKMRDICDAVPEIKFICLDVANGYSETFVDFVRKVREEFRTSTIFAGNVVTKEMVEQLILSGADVVKVGIGPGSVCTTRKQTGVGYPQFSAVLECADAAHGLNGHIISDGGTTCAGDVAKAFGGGADFVMIGGQFA

SEQ ID NO: 162378 - protein, 74 aa, Heterodera glycines
WNIQYNGIQLRNTYYALYHFIALNVCWHQHHHSSSHSSVLCLSLHDDGTSVLLLLLAMNGDIGTFRGDIVAQFA

SEQ ID NO: 162379 - protein, 203 aa, Heterodera glycines
MGFSTKPIIIDGKDHLLGRLAAVTSKQLLLGQKIVIVRCESINISGNFHRSKLKFLAFLRKRCNVKPSRGPFHYRAPSRIFWRTVRGMLPHKTARGMEALKKLKCFDGCPQPYDTKKKFVLPNSLRHIALKPRRKYCTVGRLAHEVGWQYQGVVEKLETKRKVRGAAFHEKKKAVLKLKRKAVENAKPKTALFDKILEQYGHA

SEQ ID NO: 162380 - protein, 83 aa, Heterodera glycines
MKPSFNFKLFASVFLVLCVASLVLCQHKPAAACKPPKNVGRGNLALTRWWWDGRSCKQFTYKGQGGNTNNFPSKKLCDQVCKP

SEQ ID NO: 162381 - protein, 176 aa, Heterodera glycines
MAQHQESLIRQNFAAETEAGINKQINIELYASYVYLSMSFYFDREDVALHNIAKWFKKQSDEERGHGTTFMKYQNSRGGRIVLQNVQKPEKDEWGSALEAFQAALALEKFNNQSLLELHNLASQQGDSQMCDFLEDKYLREQVESIEEIGKIITNLKRVGKGLGEFLFDKEFAETD

SEQ ID NO: 162382 - protein, 234 aa, Heterodera glycines
MMTPSTIGFRFRKPRWPLSNLRSSAVSATALTKRSSNQIPQNFRWHLSSPILTLEKSAEDQKKQNECCEISPPNATKNEGEELLYDDRIKEWIYPMDVGPMIEELEKLAYFCRSQEKDSVMNHLREMPVGHFALRLSGTRRRFLALSIRVERDEKNQKGIAHYLVLRNEHGFRIKGSKRYFQSLPMLITHHSVITDQLPCRLLLSDWRWTRGDANQRRRQSSGGSTLAVLRATE

SEQ ID NO: 162383 - protein, 120 aa, Heterodera glycines
AIRQANRRSLQRGDKSLQTRVTRFENVDTAGVLTLAHDGLVLEVVAQQLDQPAHQCLLTRQVFVQPHVQHLCGLRQHFDDEKRSLRMETDGRRGAKAEQAEPIARRGDGGGTVRQTTLGR

SEQ ID NO: 162384 - protein, 49 aa, Heterodera glycines
PSYGAPEPPSYGAPPPPPPPPPPPPPPPPPPPPPPPPPPPHQPKYPPQQ

SEQ ID NO: 162385 - protein, 219 aa, Heterodera glycines
EHPLPMDNFKNSANISPVDELSEWKGRALFLEQSVKRLVQENRELRHELGRTKNQVMQCQKDCEEARRQRDREVNKKRTIQQFEEEERRARAIASAAFADPVPLTADERGHAELMKRISPMPMRRIMVSATQNQQKTEAAARVVAAYDRTAMAAPAPQFVQQPRGRTFPTALSVFGECVPNNCRRVGAMPSKNIVGVRLTQQTNSVANASQLKRTFPGK

SEQ ID NO: 162386 - protein, 74 aa, Heterodera glycines
MTRGNQRDLARERNLKKQQQQKKQEQGTSTEKRMERDAEAMRLKQQKAAAKKAEEEKANAQAPKVVKVDPLKGL

SEQ ID NO: 162387 - protein, 146 aa, Heterodera glycines
GRLCIKSTFYKNVGTCLGVFLGTRRSTTTPFHIRAILSCSSASNAPASHTTDICWDWLTTTSSMPADNAVAIVCGVVVPFRIEPVFRNRWCNFFTWSICGGSMPNSARYLRATCAKECVSSNQQTNLTFSSTLSTRAPLLIAARAI

SEQ ID NO: 162388 - protein, 247 aa, Heterodera glycines
MLVSAPLIQQQQQQQVFQQQRPSTSASSADAVLLPHATEASAPTPYQQQQTEDQLELPTSVPSAADSQRQHRATQQPQRFFKSGSGIRIIDNDLPEGPGRRLRKNVANVRKHIDYIANALNHMEARLWQSPHRRQLRWERPVIQPDILYQSYVLMPKLTPEVPVDCVLSKFVRAAMNKVKCPIYSLCWTPEGKRLITGASSGEFTLWNGTAFNFETILQAHDVAIRAMKWSHNDQWLASADHDGFVK

SEQ ID NO: 162389 - protein, 104 aa, Heterodera glycines
MGSARLGEAQRKQLLEPLLKEGGWQMEQGRDAIKKSFTFRDFNEAFGFMTRVALKADKMDHHPEWFNVYNNVDITLSSHDVQGISERDVALASFVEDVFKAMNL

SEQ ID NO: 162390 - protein, 195 aa, Heterodera glycines
HKFSRTLLLTKHRIVLAVSDHISIAYIFVSYILYYISLPLIWLFNCMHNWSKPIKTTPYSKRCGLNSSLIGPRDRTPEFNMPSSSDLSRQPISSTPFRFRLNFDDPSAYSDNENRPSPANQTSVSLPDNGCNVSPYARYTGSGDSPTSSRSGNGRKRRPRRGDELFMDRRHLRKSREVEEDELDEVENDYTMGDD

SEQ ID NO: 162391 - protein, 200 aa, Heterodera glycines
  unsure (1)..(200): unsure at all Xaa locations
IFNPKFDSKFQRYFPYDQQNCTLVISSWTSIDYWPDSETVNLYSFIPNEEWEVMSFKIHRVVEKFVCCXMVNLVLPTSVITLVAVTGFFTPASTSNERREKLSLGIDSLLAMSILMMMVSEQMPTTSEYVPLFGLFYLSIIVIIFSGTLITALVLNVHLQKTYNRPIPPLITFIFFHKIAPWLGIRPSTILLELWQETGV

SEQ ID NO: 162392 - protein, 81 aa, Heterodera glycines
FIWSRLTTVRSESKSRGEGRGSQVLSDQQLMCGFTVLLLITSDKLQSIPFSNGEHGTTLCQSIRENFKKNRIQRRNGCISL

SEQ ID NO: 162393 - protein, 174 aa, Heterodera glycines
SDPCQHRDPNCPPCPTKRSPRPTAPSRPRAPRWSASLPLSPAAPPNRCATLPSTCTPGSTRPTRPCKPKLSPTTLTTTRRLPIRSSWLPRPTSSRASLQATCWHSRPSKSACCPSPNPRTCPLPTRTWCASTPMSFTVSAGFPSRSRSVPSAKSRSTRSRATLCISRTFGVSWT

SEQ ID NO: 162394 - protein, 69 aa, Heterodera glycines
KCLCLWTTTFNNRSRPPLLGRPVTTFSRSSLVASSWRSALAHFVMLDSILFSSNFAGIVFQFSQELFFN

SEQ ID NO: 162395 - protein, 176 aa, Heterodera glycines
TFPVFGSDQKSNVTLAKRSDWWCCTGSSSKSSSGDCPDKLRSLKHSSAAVADLFGNPLRQFFDGSQPLFQRIEQIGQIRAFRIDFRHFLTKVNRILVTLQRSVRRTERIFNSFFGLADHFLQFTAFALPVFRLLDIVLFQIFSSLFPRIIVRRFLPTFLYLLVLFSVFWSVRVASD

SEQ ID NO: 162396 - protein, 127 aa, Heterodera glycines
MDAVHVKEAEAQRDDLAKEALINDAEIKDTKAFIMEKARSFDGIPFTIQRLCELLTSPGKHYHGTGTYLRALEKNINVVTTVTENGMRITGADEEEEAEKDAPIRVESNFIVSVDEMDEPLALKLER

SEQ ID NO: 162397 - protein, 94 aa, Heterodera glycines
LLALFLIAQKMSLLRFFTASNLMTLILLLLVVLMVQLNESAPADGQGGHLAMVNEAENEADHSLTVLRFKRSCPPPCQEKDCPSPMCALCSFCG

SEQ ID NO: 162398 - protein, 90 aa, Heterodera glycines
MSAIAEKAVKIVHCEEAEVEEVEEVEISDPKEQIAEECRELPSNAPLREALEACTARVEAGAEETCVEEFFKLQKAVDQCTSATLFTKLK

SEQ ID NO: 162399 - protein, 201 aa, Heterodera glycines
ERLREKLASLIMTENHLLRETLAEFVGTFFLLLNGISANIQSFQAASVHFGPQFTWGLDLAFGVYISAQISGGHLNPAISLVQMANGSISLVRFALYISAQLCAAFLGSAVAFPGHFENCMQIQTRNGNQEFSQLFATFPSTNLSIWGSVADQMISTAILAICISLIMDKRNRVPIGLAPLLAGLSLTMIAMTFDTNGGFA

SEQ ID NO: 162400 - protein, 264 aa, Heterodera glycines
MLIGSLINNKNRQTWQFSSFSSILFNKSRKKQLNFLHLNFLRSTSASSSCVESFPEWRHQNMSNEFSPSNWPILPTTVQPDSEQFKQNEAEMAESISEFKNVVDAVIDGQMVEKTVIERHKNKGKLLARERIEQLIDQGGSFLELSQLTAYKVYGQEKVPAGGVVAGIGPICGRLCVIVANDATVKGGTYYPITVKKHLRAQEIALENCLPCVYLVDSGGANLSRQAEIFADKDNFGRIFFNQAQMSAKGIPQIAVVMGSCTAG

SEQ ID NO: 162401 - protein, 247 aa, Heterodera glycines
IEMPIFFARPLPAEKKLPILNKTPEPTESQKDTLSDDGQDNQDSGASTSSQTNLIKNVRILRKEAAETSLEPYIQFQCFAHFAISRKCVNELCADVSSDGVDVHIFFEDDFPRLPRIGFSCLSLQELYEDRALLSEKNATPDQLSFIQLVRFVDNGLNEIPNWLLVAPKRGQIFTISLDLADGNGVRVRFSFGSVSPTPWYSVRYPPYKSDFSLVIEVDKKAVLRRSYEESSTLSILSSFGLLERKL

SEQ ID NO: 162402 - protein, 148 aa, Heterodera glycines
FLRNRQFAHVQQQRHSQQHRTKMARRRRKKEPRKQSYKLYVRRVLKEVHPGKEISMRALNIMNSFVIDALDRIATEATRMAHNDRRKTITLRDMEFSVRLCLPDVMAKDANQKAQKTVTKFYAAKVRDRMRRTEMRRGEFAMMQMAAL

SEQ ID NO: 162403 - protein, 253 aa, Heterodera glycines
MSSFGPVLSSFVNSMLSESSSIVDIPSPSPSNGTQTLGTAVNGIGTSHSSTRHDTSSPLVASETFVDDAPDDSDSSSAVFYVRNNGTDGGKQKANKKQKDTFKCANCNINFKSDEMLELHQNNCRRSVLSAPANFCSSLSFCDICNRKFISPRGVALHKGKAHKGESSSKLVKPKNMAKCPIATRAVKRGRPRKVGVVPPTFVDTAKKGRAHSIAAVPPIGHQNLLSGRHRTKPTNAATAQQQPNGNVQIPKL

SEQ ID NO: 162404 - protein, 71 aa, Heterodera glycines
MKFAPLALLVILLVSLVAAVSANSNNPFDADAADNGGMKRVKRQQQQWRWSPQQQRWVPINIANVNIAQNG

SEQ ID NO: 162405 - protein, 212 aa, Heterodera glycines
MSICVDLRLSSADLPVCGRHRRVPSRTLLFFCSIFEALNFWTRLRWVTLLRRRLAIVDGSASFVRLSLRRRRPTSKKATDFHIDKRWDSRLSALVQKVLHVETELWRLSTLGGAVSAMGFFSRKFIRHAFVISIRQLRLAIEIGDPVLISRCFLYISLAFAQKGQFLTALKIVRQEWNRGTELKSAFLLNCTRGVWSTIKWLMMNRKVMMLK

SEQ ID NO: 162406 - protein, 195 aa, Heterodera glycines
MAVLIETTLGDLVIDLFVDERPNACKNFLKLCKNKYYNLCQFFTIEPKYIAQTGDPTNSGRRGESIYGTLFGEQARFIEMENVPKLRHSQRGIVSMVNNGDGMVGSQFFVTLGDELDYLDGKHCIFGQVGEGMDTVTKLNEELVDRNNRPYRDIRIAHTIVLEDPFEDPPRLSISRRSPSPTIDLIKLDNQIALD

SEQ ID NO: 162407 - protein, 172 aa, Heterodera glycines
MAGEEEEETVVEHPLPKGWEKRMSRSSGREYYFNVFSQKSQWERPTRDAEDTAKKPETVHCYHILVKHERSRNPKSWRSDKVTRSKEDATKTLESYHAELVALDVGERFSRFKKIAQEFSDCSSAKRSGDLGPFGRNKMQKPFEEASFALNVGQMSDIVDTDSGLHLIYRFA

SEQ ID NO: 162408 - protein, 209 aa, Heterodera glycines
MFSFVKITHRFYSTEPLVKKLTVIGSGLMGAGIAQVSAQANVKVVLVDQSQSIVEKAKSGIENSIKRVAKKQFEDPGKQNELVTRALSNISLSTDISQAVSGADLVIEAISENLDVKRKLFAEVESALPQNGKMATNTSSLTLADIAANLKRKDSFGGLHFFNPVPIMKLLEVVRFDGTSEETFNVLMDFGKTIGKTTVVCKDTPGFIV

SEQ ID NO: 162409 - protein, 303 aa, Heterodera glycines
  unsure (1)..(303): unsure at all Xaa locations
MPSSAQRKRAELHWGIIGLGNIANDFVLAMAYCQHPNKVTAVATSNSVERAQQFIQKVGLNSEQVKAYGNYEQLLQDADVDVVYIATINSTHLPLIISALEHHKSVLCEKPMVYSSAELSVVQTVQKTINRREGKKLFVMEGFWSGFFPSWQKIRQTVRDGQMGNPKLVSVDFSQKLPDKRRDLSNGICPLVDIGCYTVDFATFVFEGKKSDXVKVIGDVSAEDGVDNWACIALRFEGGGHSVCHYNGNLSTNSNASVTFENGSVLELPERFWASTDLRSRSELQTHRKGQWHDEHFAFPERK

SEQ ID NO: 162410 - protein, 219 aa, Heterodera glycines
  unsure (1)..(219): unsure at all Xaa locations
MVLASKVQKVINLSSKISSVQNTDHMMQQPTEEQRQRIYQTDKAKSALLHLLLTDCLAKNDETTVFDRFKMLKEENNCKIAPEMFSNLPLARLLVNLEGNDNETRTRVEEVRNLLFRALQVLIDAEITPSDELLYSFEQQKMYEEAKLSGLSTLQWLERQRSLNKRGKKRKQEVDTKASKGRKIRYVEIPXLVNFFPRTPERIAWTHERRDELVQTLFI

SEQ ID NO: 162411 - protein, 189 aa, Heterodera glycines
MPRQQQRIRQDTAVTHELPISLEDLCKGCTKKMKITKKIVNPDGTSRTEDKVLTINVKPGWKSGTRITFPKEGDVFPNRMPADITFVIKDKPHPKFRRDGSDIRYKQVVPLRDALCGMSIKVPTLEGDIIPLNIKHVTKPGSTQRIHDRGIPNPKTGKRGDLVVEFDVRFPDSIAPAARELIANALPPN

SEQ ID NO: 162412 - protein, 149 aa, Heterodera glycines
MAQLFENIGVRRKVDDKLVNGQEALKGCEVVALYFSAHWCPPCRNFTPVLKKFYDELKKSPETAPFEIVFVSFDRSADDLSNYLRESHGDWLYIPLGSEHIETLSKKFGISGIPALVVLKQDGTLVTKDGRADVQNLSPSNAMAKWRSG

SEQ ID NO: 162413 - protein, 201 aa, Heterodera glycines
MFSHSPSSLLPHPSSIHPSGITTAGASNNTLSSENFFEDEERPEENIYERHFAQQQMTKEETRLVELQKRKEKAMEKADATQQIAQDINDLNQIMQDLAQLVHEQHDMVDSIEDHVERSMQEVKSGERNLRRAVASNSAKYPVAAAAVGGAVMGGPVGIAAGSLVAGIAAAVGGAFAGLYGGRVLQRKVKQSTAVDSQQSV

SEQ ID NO: 162414 - protein, 166 aa, Heterodera glycines
MKKHVTFTPSIGDDVHSTNVSSVAESEFSVKERAEVPEIFKKLADDAFQILPLPDIDPTVTSTPAVVNNLIEAVESLDSRMPLAFQEQQQILKMQGEMLQLGVSCKEHYKKIHEQSVMRYNLEKSVNKNIDDLKEGAVVAQKLVKAKSAYEEMVAKAEALLAKANK

SEQ ID NO: 162415 - protein, 174 aa, Heterodera glycines
MAMSPSLAKGPTQPTKWHEGAAILSRSAPPMKNAAGFISASPFAASPKTSVAVGRCARCVPTAAAAPLILRAKESVGGKSRPMPCCCCCFCCCPISRHSSSSAFNEMILASAVSFGTTAGGDGFFTRRNPFSTNAFCSEGSKAKGAAPPAASLSFRCASSAAEKASICIMRCCC

SEQ ID NO: 162416 - protein, 78 aa, Heterodera glycines
KMDRDLVPRFTFSGTPGPGILSKKTVDLNHESRQNPGPYKPNLSAFFGFSPVFIWSIRFVQSLIKRIKQYPKIMGNCN

SEQ ID NO: 162417 - protein, 216 aa, Heterodera glycines
MVAANLKLSLIFVAGFCLLFIADSDAGKSCKPGEKGPPGPPGKPGNKGKPGVCKPKYETTSKYGTTTSKYDTTTSKYGTTTPEYDTTTSKYDTTTSKYDTTTSDYGTTTSKYDTTTSKYDTTTSKYDTTTSKYGTTTQKYRGKRFADAVLVRAARAEYDADCPAGPPGDAGIAGPPGPPGEPGKCYGSGSKESKEKEYKPSKRSIDNFEHGLRVAR

SEQ ID NO: 162418 - protein, 92 aa, Heterodera glycines
MIGRAVRNRPFIFEGIFKFILYPRKMAISFFEKFYTSQKRLRMRRRAVLNRHFISQRIFIFRGYPRKMAISFFDKFYTHTNALEHDREGGAQ

SEQ ID NO: 162419 - protein, 203 aa, Heterodera glycines
VFMPLHFKRRRNIDDLLKEHLIFKRSINQNTSFRLEAAIGSDSLHDRKIRFEESTNSLEENELVNFDGVVVLEGMDAFTGTTSGVLKGLCFSNSSFLNYRTAQLSSSADFSICSVSDEQNQPTKALPSAVTAMSFSGADQMEVLVGRENGRVDHFNSLTDQFNALFALPQPSELKGIHRIDGDRILTAQECGTLAVWSASGER

SEQ ID NO: 162420 - protein, 202 aa, Heterodera glycines
  unsure (1)..(202): unsure at all Xaa locations
MPCSLATQSSVLKRRAPASPQQAKMHDKKRHFDESANNGQEKADKVPSKGDKVSPTNEEKKKNVAFATLAIHAGNEPEKWDMNQVVPPISLATTYKQQFAGMPKGHDYARGGNPTRDVLQQSIAALENARHCRVFSSGLSATAAMANWLHSGDHIIASDDGYGGTQRYFRQISVQHHGMELSFVDLTKLSNLEEXFKPNTKM

SEQ ID NO: 162421 - protein, 217 aa, Heterodera glycines
MYKIVQRKERNADGTAKTDAEPFATPSTSTVVPLVRIAKAPHRKANDTTVANVPAEVPTSNTSADGLSSAALNTVRTEIAKSGGVPSPAAKQSAKDAGATTDQAQMDASIRLIDDEMELIDAVKDFLIESNTKYSVIGAIGAQGTGKSTILSMLAGNNPVDMYRQYIFRPAAREAVEACRYQTTKVSVYVVPKLRTFFLDCQPLNCAPLLEDFLRAR

SEQ ID NO: 162422 - protein, 144 aa, Heterodera glycines
YKLQTSFSKSYYQVQKNMLIIVRNGTGRLFALGQLYLVVGMMAFSVCWCSTVSPFPLDDRRLNEPRLGGGRLSVVEESPRRGTHTPPMQQQTPNEDDDHQKEYHSNGGNCFAFHSIVHFAESENMRVERMQTAITVKVLWTSTT

SEQ ID NO: 162423 - protein, 292 aa, Heterodera glycines
QTLKSNRTHGSQKSPDGGNLLKALKAAVVSAVLEQHRWDSKALDYLRVIQLNAVADQVVPDRRAWDQSCAFLANAASDRIRELKKTLEESRGPSGWSRWFGWSSPTPEQLVNQTVQDELRALLVNNPEHKQSLLDDDLTVIRRNLETRNLPGPNELSAEMIRQQWRLIYRKHFLERMLQAGHDCQSFYQNYKLGVRSEDSDLDCQAVVFFYRINRMLDLSCNALRQQIVNTEQRRLEKEVKEVLNDWSADTDKKKQYLTGRQVELAEELAHVRFIQEKLEEFIIQLHQEKPW

SEQ ID NO: 162424 - protein, 264 aa, Heterodera glycines
  unsure (1)..(264): unsure at all Xaa locations
MVDAQHFTQLLIGMMNSENEIRSEAEKQYEAIALKDKGPLLFKHYLISSADVESRSLALVLLRRLLSNSYEEFFTETQIQKDQFHNEFIVCINGETEPVLRKRLTDLLAELARNSIDDKTGKQTWTGIMQFLDMCATSDNPTFREAGMSLIESVPNVFGSDSFKYIAGIKTMFHSSLLYGADSSVRTAAVRAYVAFVCDNEENDAVIRQLSDLVPAVIKVCQHVVDTEDDDDVPLQCLGDLASTLPKILAPHMSDIXSLCAGTV

SEQ ID NO: 162425 - protein, 32 aa, Heterodera glycines
FLVKNFPKHFLSKKGIKKFIYIIILFLFLLIF

SEQ ID NO: 162426 - protein, 126 aa, Heterodera glycines
  unsure (1)..(126): unsure at all Xaa locations
FFFFFFFFXXNVLFLLRFQKGWHTFFKFIFIKSFKSVVVVVREASLNVSFVRTIKETNKLANSDLSACFHGNSSARVVHILSHHLLRLPSSFVCFNNLNNTHNFNWVAHFWSNLCASMNVSVFCLY

SEQ ID NO: 162427 - protein, 261 aa, Heterodera glycines
MASAVRALEGKIAVVTGASRGIGRGIALQLGQAGATVYVTGRAPAASYSLIEKGLPSLEQTAKEIKSRGGEAHPVYCDHANSDDVRRLFKRVEEEQNGRLHILVNNAYSGVPSLIENAGKKFWECEPEFWDDINEVGLRNVYFCSTLAARLMVPHEDGLIVHISSAGGLQYLFSVPYGVGKAAVDRMASDMGLELKSRGVAVISLWPGFVQTEITTMGEKAEQFASAARMSMDAFNAALKGAETPEFVGKAIVGLATDRQR

SEQ ID NO: 162428 - protein, 111 aa, Heterodera glycines
LCGTLCSVGPSLHRPSIFRPPLSPLPPPFPPFPPVLPASFPIPSPVEFDRSNQFPTVRAPSVMSFPLPYGDFSLSPILLAVSPISTQIPIYRPPFCPTPCAISSHFLRSFH

SEQ ID NO: 162429 - protein, 93 aa, Heterodera glycines
FTILYSSWVRVGVQIRRPCPCVHQSPSMPIPPSIRLFCRRSRSHSHSHSHNAFDEVQHFQFDCPLLAWQLLMTSKWKLSAEEQEWWTKKTFSV

SEQ ID NO: 162430 - protein, 164 aa, Heterodera glycines
MIGTYEKRRHSELPPHLQHKFSLPHNDPSIAAAAAEGARMGVEGAKLGPLSHQMIPPRKESAKQMSSGGAQVFLCILGVVLSVCVSLWTAMFSKDSLPRRISISAVAGVCSLIFALLAYAAFKKRTIKTPLDDVEISQSILREHRKSMTNSLRKSTTNGDDLIG

SEQ ID NO: 162431 - protein, 134 aa, Heterodera glycines
EVGYALDCVRKAPGNESVWSYLSGILINEPLGTDRPEIVHCCDELLARQPPCNSSHLFQFLIDKIADKMRENAVANEQQLTEMAQKSGEYLDVLERIDPIRHNFWKYRRAQLQTLADSVKFNSSNSASAAAASA

SEQ ID NO: 162432 - protein, 115 aa, Heterodera glycines; identical to SEQ ID NO: 150586

SEQ ID NO: 162433 - protein, 237 aa, Heterodera glycines
MAKWGEGDPRWIVEERPDATNVNNWHWVEKNATPWSRERLRVLLLGQTLEKGPVRIEFSDFKKLEGEATANNRKAKLIFFFEWSIDVNFIATVSGSETEYKGSVEILNLSDENEAHEIEISVHIETAGPHENEIRHILSTDGLSFVRSKVGTYVRELKEEFSKGIILPVDSKGAIRPQAVATQGKTVVDKRRFQNDKTEEKVTTAETQNALKTGGFELTETFKVPPERLFEILTASE

SEQ ID NO: 162434 - protein, 319 aa, Heterodera glycines
  unsure (1)..(319): unsure at all Xaa locations
MLQETEAKSDSSKAPNEVALSSEGRISKLYVECFNEREKCLTVIGGGKMATALVHGLVSAGFIDKSEVNICSRSKETAFRWTTQGYQNAYTNDEFYSKVKKPRGIVIVAVKPQIFPGFLDELRKNGWLNFVGPEVLCVSIMAGIALDTFKQQLKLVGFNGHAARFMPNVNCLVSAGIVLVCADXVFRRRWFSRNCSSYQIHAIFRIDESLFDAASALASCAPAYMFTVIEALADGGVLNGLSREMSVRLAAEMVKGSAQLMLKSPEVTSPAQLKDRVCSPAGTTIAGLRELECSGVRSAFIEALSASTRRATEMAPKTN

SEQ ID NO: 162435 - protein, 237 aa, Heterodera glycines
MKPQEFSGADNEQPSPSRHSIIGVKRKFSSIDYASSNSPVKVLPSFTSTFLPDLSNAQVLKPKPTNVDRLPLSNEEFITPTQPKKQQSRPNSPANGVSKLILPRSRVASIRRESDCNSEKGFGEAEAAHEKMVKSAQQVAMGFEDFCLDDKAFEERKRAKSLSEPICIFTNAFLPQCSSPSPSRGSMDGQKQCYSPSAQQVVRSNLAYSPSPSPTPSGTQSMHRMRSCESQTHLPDD

SEQ ID NO: 162436 - protein, 397 aa, Heterodera glycines
MLCLRRVLSNGHSFVFSVSSECRSTYLTTSSNDPSEFTADDVGKLYKVPSNLMNVLNVRRKMPEFFVRQLDTLRECVWLYRQQTQEAFHCLHEVDLAHRPALRLVLWGHFGTGKTITLSQLNHLAINKGYIIFGVKDALRWSRDNYRPVQLSTYKPGRLDSPWWAVRLLTAFKVENGHAWKKLAELKTTKDYEWTKVEKTPKRKPLTDIVEMGLTAPALSTDCVGALCRELRAHASAGSIKLLVTIDKANGLFSEKCAVKWPTDRRKATPDELSLNIFIRKFLMPIWSNGLCAMIADKAVVSDARDHLSVSPLDPRSLFGERGYEQIEPFVSVESQHYSEAEFNVIHDYYLEKNWIRQKKGPEGEEAKRQMMYLSAFNPSHYERLCSFSWNLSCSVP

SEQ ID NO: 162437 - protein, 246 aa, Heterodera glycines
MEERIKTELRGRQPSEVQDLLLDSCKANTISGLTEQFTSLTTLSLINVGLTTLDGLPKLPTLRTIDLSDNKLSGGLDKLVECCPRLYHINLCANKITSMEALAPLSKLEELAALDLFDCAITEGPEYRSKVFAMIPQLKYLDGFDINDVEAEISDEEEEEGAEDALEDEDDSEEEEEGVDTDDEAALAYLNSSKALNDEDESEDYVEQRKKPNDTAKEATNGEQKANANKNSGDNRKRKLSDNGEA

SEQ ID NO: 162438 - protein, 73 aa, Heterodera glycines
MKLTIFAILFVALFIAIAEADGNVRAKRHEERLKRQDNRADEENRQVDSADREKRQDNRADREKRQDNRAIMY

SEQ ID NO: 162439 - protein, 196 aa, Heterodera glycines
DTNKSMKFDKNNKMNAPKRHNSVSFTDPSILPTECQNRTKWRSYSTNFQSNCHPHGSLLSFVMRHKVKNGGPSREAAMFAVPSSIPSLPMAILQAMIAPNLKKGHSSGTFSLDGEGPSVFSSVCSSSVSTTGAQSNAFGRTSECQLGTTPNRSSDDFCVCPSPWKYAQSEEKETNGYLFILHSNWALQKERMENRR

SEQ ID NO: 162440 - protein, 150 aa, Heterodera glycines
MDEDEKDPDTYGNWQYEEKPCACHCSYLRAKKFYRVDCDFMDRTTKIVLDAFLSDTALSGLDITHTALEVHYECILCLEIAYKTYEIVCEDETSDRWGRYMTTYGDEPIVGIRTTDFDGIQRVFDGMWKDYNLIVSNCKHWTDDMIRRLS

SEQ ID NO: 162441 - protein, 188 aa, Heterodera glycines
MLLSSNFVGVGRVASRAVHRFFLSTSAVRLQQQHKEEENMDIENLFSEQQNLPQSQSEDQPQVFDAPKRRFNKGINRVELLGGVGSQPLVKQTAQGSAFASFNLYTNVERRLGDGTTTTNTEVHSVVAFGSMAKYVEKNVERGTRVYLTGRLHYTGGALFPDGTRSPRICSVNLESIYPLSKQGAILR

SEQ ID NO: 162442 - protein, 145 aa, Heterodera glycines
MVRRGGRSSSPKASAPVRSVKSTSPARSAVPSRPAGTQPTSGATAPQQKGPGLLGQMAATAGGVAIGSAMGHAIGNMFSGGNAQEVAAQQDVPANSDNFETTKQYSQPCEIEWRQFLECSQNQSDVSICQGFNDLFKECKARFGR

SEQ ID NO: 162443 - protein, 200 aa, Heterodera glycines
  unsure (1)..(200): unsure at all Xaa locations
KIQDKEGIPPDQQRLIFAGKQLEDGRTLSDYNIQKESTLHLVLRLRGGMQIFVKTLTGKTITLEVESSDTIDSVKTKIQDKEGIPPDQQRLIFAGKQLEDGRTLSDYNIQKESTLHLVLRLRGGMQIFVKTLTGKTITLEVESSDTIDSVKTKIQDKEGIPPDQQRLIFAGKQLEDGRXSDYNIQKESTLHLVLRLRGGQ

SEQ ID NO: 162444 - protein, 104 aa, Heterodera glycines
MASSSNAQQAAALQMVADLEIEMMTDMYRRMTKSCQEKCVDTHYREADLTKGESVCLDRCVSKYLEVHDRLGKLLTQMTQQDDRAVQQQQQNLAAAAQKMHINK

SEQ ID NO: 162445 - protein, 315 aa, Heterodera glycines
MTFPRNSLLRSPRIRPNLLNFSACFSSPSDGSAPRLEGSSPPPLASSIRFPHFVSRQKFTLSSTYEKQDWFPKHMGVQLKVMEGKLRTVDLVIEVHDARVALTGRNPSFGAKLYSVRPHILVFNKMDLINMKRYKEPIEEYYRNEQNITNICWTNCKNLTNKTQFQNLMDKMLDLLRNEHRFNRTVKTEYQVMVVGIPNTGKSSLINALRNVNLDFGKAVKEGARPGVTIRVQNRVRILDRPPTYLMDTPGVLNPWANNIDAAMKLAICNLVLDTTTRPNFVADYLLYFMNKYRDFSYVDFLRIREPSDDIKQVL

SEQ ID NO: 162446 - protein, 244 aa, Heterodera glycines
MQFLCHFICVVKMQQLLFFLLLVADISHGKGQKEEKSEAKCDEKNNNEAIRLHNWGGNFKFCTQNVEYPRTTAEVQQIVRRAQKLRVFGSRHSYNKIADSCGTLLSTLGMNSIIAINGSRPTVTVQPGITYTDLAPTLYANNFALPTLAAIAEITVAGATQTCAHGSGLPNSNLATQVRSMRIVLANGTEASFGPESAELHAVACGLGAFGVITEVKLNLVPTFDTISYNFVSSPTESLYSHFD

SEQ ID NO: 162447 - protein, 215 aa, Heterodera glycines
ILHPRVIEWEKMVRGLINKSREEQVEQQQEVIRSLQEENRSLKTLFRRVCAHSNTISSALLMFAEDHPDTFLQHPILLPQQQNVPTPSQLQLLPTRHDNTSFSDSWPILGGASQSLTMRASETFRKTTHPPPNLGLHLFGIQEEAIIPGGTVAVTKDAEVTPARKGKPSPKKHRPFRNVFKALGDGVSKLKFSTRKRPEKQQHGTTLSGTDQRRP

SEQ ID NO: 162448 - protein, 173 aa, Heterodera glycines
MSDTNVVTNFIAGGVGGSCAVITGHPFDTVKVRLQTMPKPAPGQPPLFTGALDCVRQTVAREGFFALYKGMAAPLVGVSPLFAVFFGGTALGKWLLQNEPGQQLDFKQNFTAGAIAGVFTTAVMVPGERIKCILQVQSMDGSAGTTPKYTGPVDVVRKLYREGGIRSIYRGTA

SEQ ID NO: 162449 - protein, 343 aa, Heterodera glycines
MVECSDCSVGVAKVKTAKDGLPRCSDCFIRWFEKDVHEAIERMAIFTPGDRIGIGVSGGKDSTVLAHVLSRLNKRHSYGLQLVLLCVDEGIKGYRDDSIREVQKNEADLSLPLTITSYRDLYGWTMDEIVAKIGRRNNCTFCGVFRRQALDRAALRAGCNKLATGHNADDAAETVLMNFLRGDIGRLQRMGAAARQPTDKATTKQLGNNSDDSGTTSAVAAAETGDDESLPRVKPMKYAYEKDIVIYAHFGKLNYFSTECIYAPNAYRSNVRSFVKELEKSEASGILDLGLLGESTRLKAHVLQPNWGNGDRWGYHAKPKFCRGGQPLDGLNVKRGPPPKQGQ

SEQ ID NO: 162450 - protein, 259 aa, Heterodera glycines
MGLCKCPKRKVTNLFCFEHRVNVCEFCLLSNHESCVVQTYLSWLTDSDYDANCLLCFESLSSKETLRLRCLHLFHWDCFDSRARQLPQTTAPAGYKCPSCLECIFPSENQSSPVVDKLRAKLQTVNWGRFGLGLPSIPENEQKVLAAKVIEIASNSNHRSDENVSNRHIEAHTQSPMIANSITCHEDPFEANTFTARSKFPTNSNGNSSNRIFIGNEDDSKYAKAAAAEKNIRNRFVRLPRPLKRVFFALLVIAFLYFF

SEQ ID NO: 162451 - protein, 90 aa, Heterodera glycines
HNSNNKMMALPSDIPSHVSRTRRAVHRRRRKGPAALHPAQCRNYKCKPKKTTNDRIRRLLRLTRRRHDFCPAKYITCRTTTLHITTLITH

SEQ ID NO: 162452 - protein, 41 aa, Heterodera glycines
EDGPRCELNRFVPLPDYPSMCETVALVVLYCRWNKNFIKEK

SEQ ID NO: 162453 - protein, 109 aa, Heterodera glycines
GKSNKKMLVRQNKIIAAAARGVLLVSNRSTTRTPTMCAPPMRCPSVPKRFGMFFFCCVSILGYPTYVMLNLDNVRPFKQTHFNDELNEKLEERRRLRAEGKLNVLQKKL

SEQ ID NO: 162454 - protein, 108 aa, Heterodera glycines
HSLSRKPIGSLLCHKRICGPLLHYAELEQSFLQNLGTNRTLVGKFMVLNDGRHQQSQILDNGKGDRIMHKFGMVFENGIEYGIVIVHHICLQLLLKFLAKILVQSSAL

SEQ ID NO: 162455 - protein, 275 aa, Heterodera glycines
RKGLSFKVVVDMNGNTVVYNDRDVPIGTGSVRKVGERSYEAVISKNLFITRLKDVRRGPCCRELTGEECTEPIKLANPQFSHPSQRDDNGTTRLTWPDCFDMSIDVTLPPTVHINRLAMNYWQKQGAIDVWMKFFERAPNRAEMEKEFFSQLDNPLLGKAFKLAIIGEWLAANSLDQGSYTPTNSELLEFWVSKRAPDRLLACEHGVVDYEIEGSKVKTNVLFEAATTAGNLPNIFKDKKCATFEKLQEERFKQEVHEFKQRGSGGGIIGSIGNF

SEQ ID NO: 162456 - protein, 190 aa, Heterodera glycines
MASMSDRMKLMLSSGKGADVHFLVGQSDAKKILAAHKTILISASDVFETMFRFDAKNANVGNVNNPVEVPDVEVGAFNVMLSFIYADDLSQLDGDNAMAVLNTAKKYNITGLVTAIKNMPIAKICGDVFMTLAQSRLFEESDLVERSLAYIDQNADTVLKSEEFLQIDQQTLCEILGRSQLAVEEEITIW

SEQ ID NO: 162457 - protein, 144 aa, Heterodera glycines
VFAIGITAAANVRSAAGHRRVHTFQLVHFAEQLQPFTATHRTATTTFWICSSSGQCRHTWQCQRHFVGVPFLPHFFFQNFLSLFFVRLSRLSALCPRLLLGYSSSSFNAFRVTTLSNIGKKFCRRRQIGGTVFHTTVMKMKFFS

SEQ ID NO: 162458 - protein, 85 aa, Heterodera glycines
GKVTFKITLTSDPKSPFKVLSVPENAPFTAVLKFAAEEFRVDPSTSAIITDEGVGVNPAQKASDIFMKYGSELRLIPRDRVGQGE

SEQ ID NO: 162459 - protein, 142 aa, Heterodera glycines
ERSAIDRANRAEINKVKMRLCLALFIAASALSLGRWIEAGVVEDVKDYVDAFSEISAPAATIGEQLRKISARVSKLVQLGGPVGSLAALAMQKALEPESEEMVALKLLHSTMVKRFDVLDRRVEHLGNRLVQHMALVEYDHV

SEQ ID NO: 162460 - protein, 173 aa, Heterodera glycines
ELCKPHAKAPGECRQESKLRASQQEGQGSDCKLHACQQQEEGNRFWALRAGQPEGQDSDCKLRAGQQEVQHRDRKRRAGQPEGQDSDCKLHAKQQRDPPYGMMWLMRMMTMNRCQKKWRSRLRTMSRPNLFKKFTKADGISEMAQQQQQSSDLIDRCRIFPRHTKYLIVFLIK

SEQ ID NO: 162461 - protein, 119 aa, Heterodera glycines
ECCSSVSASDNGTAPSSSSSSWAELGLSDATLNALGTMNFPFPTPIQNAVIPIAVKLKKDIIGAAETGSGKTLAFAIPILEHWLTNAIATNVQHFPVKGSLFALIISTTRELDVQQGCA

SEQ ID NO: 162462 - protein, 151 aa, Heterodera glycines
MPKYPSSIAAVAIVGKLNNPLLVHSFSNDTDLKYQFLSHAACDYADAALNSDTVSGSGYLGLLTTLDDLNVFGHQTNTKVKFFLFVQSGISPSTQAQTKDVEVKAAFELIHQAYLDLLANPFHDPDQVAMVHSPRLLARLQSFVTASPSSQ

SEQ ID NO: 162463 - protein, 197 aa, Heterodera glycines
  unsure (1)..(197): unsure at all Xaa locations
QYKGVLQFGSFKLKSGRTSPYFFNAGLFNTGDLLNQVGRFYASAILDHEATFRPSVLFGPAYKGIPLVATTAVNLAVMGHNMPYVFNRKEAKDHGEGGSLVGMSKLQGERVLIVDDVITAGTAIRESFPLLRDHNGATVAGVXVALDRIERRQGERSAMQEVEQDMGVPVRAIVTMENIIEYLEKKGGQDEALAAMR

SEQ ID NO: 162464 - protein, 229 aa, Heterodera glycines
SNLKDKIEMFGLKTARNLQKYVQVEWEDGLLAKFNYVWLRDNARRSPSLDHLDLNARPQEIKCSREALEVQWPPFIASRYTSNFLRDIALDSPVERLYGAHRGRQNGQFGRSKPSMAGPLNGHLLAFSDARVPIEDGIELGKCYWGEEAQEPGTIWPHLAKVPSVVAVDSLSGPARLSFVDVEKVLIEMRKRYPKHLVFLGTCVLEYAEGPFFATHPVVRVDDQGHILP

SEQ ID NO: 162465 - protein, 179 aa, Heterodera glycines
MTYVSAQAHNVLSDIDKKLHENNAFTNLLGKIETKTGLKRLHVFGALVVLYMLYLLFGRWAQLACNITGFLYPAYISIKAIESHQKEDDTQWLTYWVVFALLNVVEFFSNTILYYFPFYWLMKCALLLWLYLPSTLGAQLLYTRIIRPFHLQQHKNIDSMYNKLAGGAQKAYEEHVKET

SEQ ID NO: 162466 - protein, 207 aa, Heterodera glycines
  unsure (1)..(207): unsure at all Xaa locations
MLSSSACCTLLAALISAAFFAAANPPTVKQCLCSEIQPCTQKYMNTWKACMEQCKGHLSGVGGNVDKLGHCMXATRHSSNRTIKCTQSHSQTACAKSAASAKQVPKRYPETLEIATISEINRMVNSMGIEGAMKGLMDAGKKMYGCTSKCMNSKAGNCEKSFKCGLDYPPDNVAVQEVKKCALNSGLNTANAQALCKCASAAGVKNL

SEQ ID NO: 162467 - protein, 260 aa, Heterodera glycines
MVIPSSLFSLMEIRKTKTFSVSPSSISDSPPNSSADIASSLPSGDDEVYDTAFISRGSNCVAVATNSAELRIHCLDSGESVGVGHGHSQSILCVDSPSWDDQMVASGSKDNSIFFWRIGGVKTDSASDGHQNLTDAFMADKIAVATGHTHSVASVAFSHSKSLPFLVSVSTDTTLKLWPLSELIVKQEKGEQQQQLGDFKLSASATDVAHSKDINSVDISANDRLCVTASMDKTAKLWHIDRKTGQLSAGGTLGGHQRGV

SEQ ID NO: 162468 - protein, 138 aa, Heterodera glycines
MENARLESFATKKRDKIIQITKEQFLAPIKDEYVRRLSQTPIEQIVDDGYNPGPQKPDGTVNFECHCVAHLVASPCGHDFRKAISCQKAATDAELEKGKCTEEFFSFMKCAMKTQCFRSRDEETLNDPLQPQDAEGDH

SEQ ID NO: 162469 - protein, 172 aa, Heterodera glycines
MRLNVLLAILAPLLLLIATATLCGATGKEAAANKIGVAAVALSEADNSTTPAPPPPPSPGGSDDKKKDDDDKKPDEDPAKKGQRNGHGRRRQKNGRSGRSIWRGVHFCCHSFRHGFDVRTDQNVCPLGEAARVGPTELSDVLKKHGKHWAKTNKDFLISFVVVFCIIFITSH

SEQ ID NO: 162470 - protein, 125 aa, Heterodera glycines
FVYTHLTIMSGGRPITTLAEARADFGRAKGQFKRAVMALPNHSLDGTFSSLSAYFGLDSSVGVQIVRDLGLTDPAAIFEKRVDHLCEMVSEHWDVQMFGQATRYLRLRSLNYNDLAGCFRRPSTS

SEQ ID NO: 162471 - protein, 204 aa, Heterodera glycines
EDEHGAIALVRMCKAHREMTVVAIGPLTNIAMAVRLDPDFLSYIDKLYIMGGSLLAKGNATRTAEFNFACDPEAAHIVFTSSTKHSTRAPKIVLAPLELTFDQAFDWDLIARLSDPSRHAAHPWSKFLYRITAALRRMFRSPAHLDAVAQAKDKHQARRACAAAPCCACGYVRVPLLGHLRFVRHVSAGRARVCGSDRGSACGD

SEQ ID NO: 162472 - protein, 156 aa, Heterodera glycines
  unsure (1)..(156): unsure at all Xaa locations
TPSASASASRTSAESDPSGSTTNLCFFNSVSTILRVSCSSSSSSSVSSSSLPASVRSSYVSPSTLDIVNAVAAFVGAIVCAIVFGFSLLAVNIGTGSMLANRSAIICCNCLASSCSSSSSCCFSXASVCCCTACQCCLLRLLLFCSYGIVVILPLF

SEQ ID NO: 162473 - protein, 218 aa, Heterodera glycines
MLPLTPAKRFVSKKHCVDSIRWLSLQRTTFAKTIPPGPLLFSHVYLPERTPDGQPQRKPSEHPDFMKYDFMADPEFEKPPPPVELFLLEDIKDLGEKFDIVKVSAEVARWDLLLKRRAVYASPFNLKYYAEKRKKYLAEMESRVRIPLDLLKMSALLMSQILPVTVSADVEWTLSSEMLINSTQSLGLYITEPGIIHLDNVSTLNGPRPNIEGRLVPF

SEQ ID NO: 162474 - protein, 152 aa, Heterodera glycines
  unsure (1)..(152): unsure at all Xaa locations
MANDVWLDTLFWIDRTEAGGXHFKLPKWKLGELGIHRAPSGWDWGGTATVTVMDDHPMMNPLPLAKCPAPNGVIGFRAIYIWCVDLEVITFLQCLQRVLNLGIAVQFTIHSKDVRCWYFEAPSAISVNYVVVCHRVATPRSLSGRMNGRASG

SEQ ID NO: 162475 - protein, 171 aa, Heterodera glycines
SFVHFAIPMSPPKRAKVSADDDGETISDDGEPSTSAGAKRKQKASKPRQRKAHEAFILLVDVGRSSAENSAGAQSDHGTTTDLDRSVQIVDWVLSRKIFTESSDRFSLMFFGHENTSSDDHPNVYVHNEQFATARVVMAARVAERSADERQMPRRLRRRPLRCVGRTESAL

SEQ ID NO: 162476 - protein, 201 aa, Heterodera glycines
MNNDQLHDWLADLHGRFCPGRYRQQLSSDGSDVVAPPANGDASTAPAALCPSPESPSQWRPSLCHLSPPTNILLQYFSCNFEDARLSSPLVAQLLALYYKFGAARCFVLQLVPTFIYLYLKALNKRWLNAAQMLETLFLAIYNEEILAAGPGTPSMVKRSEEVLLPLLRSASVVPSSAADFGTISGGSVPGKVNICPESAS

SEQ ID NO: 162477 - protein, 193 aa, Heterodera glycines
MSSNPVEGTENLGQLRQTAPQQTTAADPSSLNSSNSAAVESMDSEGVYLFADRTQSSNSLTPEQAFVHMVKAMLGTGLLSLPYAFSHSGLYLGLILLVLICLVCMFCMRQIVFAAHYICTKNGREIIDYANIMRGAVEAGPSWISSRGYFFKQLVNVKMFVAQLGFCCVYQVFMSENIADFFNKNTAIRLSTG

SEQ ID NO: 162478 - protein, 119 aa, Heterodera glycines
MQHARCPYVKENAPLPTNIKEALPKDVSVKIQQIHDDGSLSAEQKMERIDSIICTLPENDIDQIPDPPEVAQLPADVRQRVKQIERQQGKSFSTKFEEIMKYVDTLPEGTKSAAKNIFH

SEQ ID NO: 162479 - protein, 138 aa, Heterodera glycines
MIHWYRRRPIAFATKAIHAGNRPEQWDMNQVVPPISLSTTYKQSRPGEPKGHDYSRAGNPTRDVLQENLASLEGARFARVFSSGLAATAAMANWLRTGDHLILADDGYGGTQRYFRDISVAHHGVQLNFVDLTNLNEL

SEQ ID NO: 162480 - protein, 186 aa, Heterodera glycines
MKTKPVKLGKLGAMIARNRCTNNDSDDGGAAAGADGSEVDDDAVVGGIHPAQRQGRDAEWHRQYNQLISIPAHRANWTTTRKLFGDQLGWPQFSALFFASALRGDGIDPLRQHLRSVAKGVDKWRMRAKDISTSDPRMLCAEHTRSALLNRCPAYIAYALRTRITEWEESERGGVLRIAVDVFCDK

SEQ ID NO: 162481 - protein, 188 aa, Heterodera glycines
MAAATTTMPSFYFHKHFFQRIFPGKPFFVQVFSAGVLAATGDILCQKFIEKRDKWDPFRTSRFALTTAIVIAPIQFHWFRFMDRRIGNPKREGPAGKVTLQTGLKRVLVDQSLIAPALTAAFLFSVNFLDSFSTQNAIQRTKRIYLDVLVNNYKFWPFVQIVNLTVIPLHFRVVFLQFFGIFWNIFLS

SEQ ID NO: 162482 - protein, 206 aa, Heterodera glycines
MARPFIGFAFDAFKRRLGAHDFPFLRGFIHGFNYYDAQRVKEIGAERAAAEWVVRCEGKVKFDHSPHIFSDYNALQRFTSELDPKRESDRVHLVAVDATDSCISGWGCRHFDGLSRLQNVQFVRCKSLTDNGLQMLADSSVSDTLLTLHIEKCPKVTNSGIRHLRKLKVLNSLTLQNLKNVWKPEKTLDEIRPNLPSDCHISYKEK

SEQ ID NO: 162483 - protein, 209 aa, Heterodera glycines
SRKGETTVQPLQVSLEDLYKGNNTKLQLTKKVLCKTCNGIGGKQGSVRKCDRCQGSGKVFHTRQIGPGMIQQMAARCDQCSGEGEMVDEKDRCKKCVGRKTVQEQKIIEVKITPGMRDNQKIVFYGEGDHEPGIEPGDVVLVIKTKSHEQFKRKGDHLFMKKTVSLADALCGFTTTIKHLDGRQITLTTMPGDIIKPESIRGAIQEGMP

SEQ ID NO: 162484 - protein, 233 aa, Heterodera glycines
MARISASTQAATMMVNSIPAGLAAPQQIPQTSQVIAATVISATGASGVLQLGQQSSNSEFLSAFECPVCLDYMLPPYLQCPSGHLVCGNCRPKVTACPTCRGPIPSIRNLGMEKIAASLQFPCKFAHSGCTQFFYHHEKVEHEEICEFRPYQCPCPGASCKWQGSLADVMSHLMKLHKSITTLQGEDIVFLATDINLPGAVDWVMMQSCYNAFFMLVLEKQDKQEQSGQSYQM

SEQ ID NO: 162485 - protein, 170 aa, Heterodera glycines
LFSFPEVSCERTATESIMPPGFKEYFFLDKLAKAFNIVKQTGGIRAAIKQRYLMDTNRAGTLIGEDQFGNRYFEDNTYFVPRNRYVVYAERVWLDYDASQIPPEWHRWLHHICDKPPTVEPPPERKKWMLEHEPNNSIVMSKKYVPYSTTRPKVEGWVPGRKRSEEGTTH

SEQ ID NO: 162486 - protein, 151 aa, Heterodera glycines
HTTTTTTIDGCSLTGVQLLMGLPPIVRVSEGRVPRVEQFSLALLLLLSNFVHFFDVLQQKLDHQFSVANRFARAGEGEVDKAMFRIFFANLNAYDARFVHNVLNRFALLADHLPNFVMRHFDMLLQKLKHVARLFSNLRIDGIDLNLAKAL

SEQ ID NO: 162487 - protein, 191 aa, Heterodera glycines
MFHCYSLAMLSLITLLLSVGAGAFWPYSGGQPVDASTAVSAPSGAHSGAVSSSYHDLSLVNNGCVYHNGMITENGGQARKATAEEEAKVKQYFASSQRSQEQFQQAMAENMRRMFAAPFGAWQFPPFPQQFPFSSMPMIETPCFCESCRNGASMNHKVQSSMSSVMGENNGNSYNEYSVVDGQQQTEEHQQ

SEQ ID NO: 162488 - protein, 196 aa, Heterodera glycines
MRSARVNQRQQIEELAQNSALLQDMTILPHNYNFEIPKTIWKIRTIDAKIVALQFPEGLTMFACVIVDILEKHTGAEFIILGDVTYGACCVDDFTARALGCQLLVHYGHSCLVPIQDTVGIHLLYVFVNIDMGTAHLLDTLRHNFLPTAGDGMEKMPKLALVSTVQFVATLQIVKRELAKDGFDIVIPQCSPLSPG

SEQ ID NO: 162489 - protein, 182 aa, Heterodera glycines
MSSPSAGKRRMDTDVLKLIESNHEVVITGGLNEFLVKFYGPKGTAYEGGVWRVRVDLPEKYPFKSPSIGFMNRIYHPNIDEASGTVCLDVINQSWTALYDLSNIFESFLPQLLTYPNPADPLNGEAASLYMHKPDEFKAKCMEYVRKYANKEALEALDKKTMKGTENEGDAGEESDDSTISD

SEQ ID NO: 162490 - protein, 217 aa, Heterodera glycines
MDLSAGDEQLKRNFSCKICFEPFSKDRRYPISLNCGHTFCARCVRQLSSFGTSIACGLCRRGTYSDFRQLGKNVTLLDLLENANLLAGEDPNETTDDDEDNAPLNQPWRGANHFVSSAALTAFIDRHADLRSSVRQFLSPSQWAEFDGPLDAIRCSLFTIEGQLRDAGDSFVLQEGQLEQLEHLFQRMMSEYYHQQQQMQGPFSGFVPVRWAVSGDS

SEQ ID NO: 162491 - protein, 146 aa, Heterodera glycines
FTVSGEVEEFLSTLKDGTVLCKLANALSPNSIKKINTSNFPFKQMENISFFLGFAEKYVNKSELFQTVDLFEGQDPNSVLICLAALARKSEKSFGKAGLGPKEAEGSKKEWTSEQLRAGDAIIGLQMGSNKGANQSGMIMGNTRHM

SEQ ID NO: 162492 - protein, 284 aa, Heterodera glycines
MASPPHNIDLNNKTTAKMAVKWQKLLTDLTSSCSRLISSEALGLPPALSGGPNLRNERPSAEGPSKCINEIRTIAAELSPEMLRFGPVNPSLLWASSFCAPVYEQKDLFEMHVFGLRSAGHSIPLHDHPRMYGFIRPLHGRIRICTFSWLEPEEEQKIVTERRKRAGMAKGASGVIRRPAKFTGELILDGACKDPPIAIVEPNTANVHSIEALEDGAAFFDLLVPGYNDSRSCNYYTLSDDKGNGKIGIGDFVWLEGSEEVPREFTMQQLRFDPFLMSNTNRFD

SEQ ID NO: 162493 - protein, 208 aa, Heterodera glycines
MVLCERTFSLSEPLLPETIKFIKESLEKQGELHFELPHVFVVFGASGDLAKKKIYPTLWWLFRDGLLPRDTHIIGYARSRLTLETLRTAFEKHCNVRDGERPKFEQYIKHCSYISGQYDTDEGLIALDRAIIEMEHTFKKPANRLFYLALPPEVFETVTEHIQRHCMSKCASAWTRVIIEKPFGYNDVSAARLSTHLAKLFAEEQIYR

SEQ ID NO: 162494 - protein, 149 aa, Heterodera glycines
  unsure (1)..(149): unsure at all Xaa locations
MPRRATTLARRNSPTSTPSSTRSTPTRTWATCKSTLSVPTRPRVTISASRRCRTLVSCRRRVTLGPAITAMATGPPRVTSRPTSPKPTKRPGTTLARRRAPTWTXPPWATRTGATSTAAVPAATCRPTSSRPTKRAATTLANSRTPTWT

SEQ ID NO: 162495 - protein, 317 aa, Heterodera glycines
LFSVFPQNLFGYSCKSLSGKEVDWFVAYKLPDLGSDGDGTAFLYSDANTAAWRLSDKNVEDKTSAIGLTVSQLFTAKKKKGDFFTLFNDENPNNGKTDSNRAHMKGVLVFDDISGFWLVHSVPKFPASTGADYLYPQSGKRNGQSMLCITLSSTALKEIGQQLFVAQPNVYDFQLPDSFARLFPDLAKAVNRTTFPYKKRVPFSVTDVHSLKGQSFTTFHKHKQFGKDLYSELVAPRLKSSIYVETWLVGRGDLPSDCSSSFKVHNVLSVKASKFAFKNTEDHSKWAVSESGRWTCIGDINRQQSQARRGGGTVCLS

SEQ ID NO: 162496 - protein, 207 aa, Heterodera glycines
MANDSRSSSSASSRSRSRSRSRSPRRREQRRRRSRSTFSRSPSPGQKRLHIGNLDESVRRRDIEDVFGKYGRISDCWMASYPPFYAFVVFENNKDASACMKDLGNTAYIKGCRARVTVALPRKGSSLDANSMNGATYRRGPPPPPRRYYDEEDSHRRRRRSRTRSPRRRRSPSRSRSRTPPRRSRSPRRSARRQRPPSPKREPRNRG

SEQ ID NO: 162497 - protein, 236 aa, Heterodera glycines
MASFILFIILIITKANNSMGQDSGTNDVQLTLVNGCPYKIYVAGAVQVNLTVNERQTKNVPSVSTAQRLWANTDCDSENNPLCNLQAAMPPISLFEWTFDADGKQTYDVSYVDGANVPISVRVLNCPGVNFNKKLGNSLDTLVDQLPDAMKMDVFGKKRVKSVCLAYNTDSVCCRSPFGTPETCGPTKGWTDDQKKGYEAMLAAFPNSYNYAYDDHIATEVCINAKQFTIGFCTNV

SEQ ID NO: 162498 - protein, 204 aa, Heterodera glycines
LINVLSNKSLISFFLLQIFFVSFASRAVKRSLYSAKFPLALNEIRSVVSLNSYFSKIVQFCSGVLLTENIVLTAAHCILSDEFGLADYIHVKGFGWNAHSTEFVIRTDFIFLDLEDSICADIALIFLPPKVTGIFGTAKFTKFTESEWSNKSDSDSKIYALGYGITELHRMSFRARKVPLKKLEQKVPKCSLEFYFADSALSCS

SEQ ID NO: 162499 - protein, 112 aa, Heterodera glycines
MASKKADENDEPEGSEGSPTNKNRWDADAANLEKVTDFHEEKDEMNEISKESLGNLKAQPGEKRFSVRKEDVQAIVDDLEVSRIIAEKKLIQHEGNLKAALLDLMGFAENNQ

SEQ ID NO: 162500 - protein, 80 aa, Heterodera glycines
RRRCCFVSVGRWAVEETCFGFPFFVLGSLLSAVISGCCCCFCSGGGGTATAADAAPAAVATTLASVPFFSFFGAVLPVFG

SEQ ID NO: 162501 - protein, 218 aa, Heterodera glycines
QAINVIKEMRSFNSKSHQYDSSKNFQELLSPRLFQRRQQNGGTIVQRVLQQQQFQQMFQQYQLQQQQQRESPPPSTVFGNSCDGTLCQSDRLTSDSSQTLLHIGPNGDDSNDLVGVGAADHSADVTPLETADNVRNSDSMHSQQHHHHHHHRAHLQPMPPQQNQQHSSAVSRASSVRSAPLRPSRYESSSLPRMGVNGGVGSSTTNINSNGHGTNCSH

SEQ ID NO: 162502 - protein, 205 aa, Heterodera glycines
SLTINNDILDDVIAFIKRSELAQNFSLVSHHFNSLAQRRMHDANAHWVEGDCVFIANATTTRMIIPRGNNGGFEEVPVPTVAQPSYVLGFRGTIHFNGTLSDNALAFFRHALPPPTTLYRFSVLDEFYRANGLLSPFKTTERINTFLDTCVHLVELGGDEAFVGAFLNLPVMRQRVRKLRATRHSELFLNWLQQSDGEWGQLRIM

SEQ ID NO: 162503 - protein, 167 aa, Heterodera glycines
MSLNNSNLLGKRKVALNERRKIYIQRDYSQALVVKFSTDFPEELEHYIDRDIWLNFVTDLNQIYAEAEKLTAIAYLENILGLVTCHLSMLCFKSLWKRKLEEARALLYETNQQNFVRNGVYVCNPLEKGFRVIEVVLLDEPIPLPAVQDENNEKNSVPKPIVLQPRQ

SEQ ID NO: 162504 - protein, 70 aa, Heterodera glycines
GWGVMVSHRSGETEDTFIADLVVGLATGQIKTGAPCRSERLAKYNRIMRIEEELGTDAVYAGKSFRNPQN

SEQ ID NO: 162505 - protein, 95 aa, Heterodera glycines
MAPAKKKWSKGKVKDKANNAVTLDKATYDKIYKEVPTWRLITPSELVDRLRLNGSLARVALKELADKGEIKLVSAHGSQLIYTRSTIGAEPVAAA

SEQ ID NO: 162506 - protein, 57 aa, Heterodera glycines
MQQQQPVPKCGNVKCPCGDACQCGTDCKCGAKEASNCANEKCVCENCKCGADCKCGQ

SEQ ID NO: 162507 - protein, 129 aa, Heterodera glycines
MHSLLCPRASSSQLSALFKRFSVGNGTASTDCATKKGPVDVLRARLLYQSRKRGIRENDILIGGFAEEHLVKMEEHELEQYDRIINGRHTEWELFHYFSGVKEAPDDLDKNAVFQRMRQHFGEKTPRQF

SEQ ID NO: 162508 - protein, 215 aa, Heterodera glycines
MLLILKNCFGRLHVICHQLTRRNFRLLLHRRKEFSKPIFFSVGQPKSSFTGGNASGGSGGMPPNPFQGMSNWQKMAVAAAVIVGLQYFINRLAYTEISWKQFYTDFLEKNNVERLEVIDNKWVRVITRDPTQTVFYFNIGSVDTFERSLTQAQQHLGMETSQQQVPVLYKSESDIVGMIPHMVNFLITGIFLFYMFRMFRGFGGKKPGQRGGGGG

SEQ ID NO: 162509 - protein, 231 aa, Heterodera glycines
MSTERYSFSLTTFSPSGKLMQIEYALNAVKGSAPSVGTRAKDCVVFATENKHSVLTQPVSKISKLSDHIACVYSGMGPDAQLLVKKARKIAMDYQVLYGYEIPVPQLVSRVAAVMQEYTQSGGVRPFGVSLLIGGWDSEKGALLFQADPAGSYFGWKSTAIGKNDQLAKKLLEKRYNEDIEKVDAIHMALLAMRETYDVAMTEDNVELAVCTKDGFERMNKEALREQIQPL

SEQ ID NO: 162510 - protein, 184 aa, Heterodera glycines
VLAMAIARQFRYSIYLLLVLVRFSLHQSAELEDLQRLCPDLKGAFCSHCDHKSVEQICPIECNFCSTFRSNETPKFFGNAAENLIELKRQCATIRLAFCNVCKITSINELCVEECLDCEAGLRDEQKEVVPLVQTWQQSAGDGLAIGDDGTNSAGEAAELSESEAEGREVPAEVPIEMDSLALF

SEQ ID NO: 162511 - protein, 96 aa, Heterodera glycines
MATLDAVEEPLDLIRLSLNERVYVKLRQERELRGRLHAFDQHLNMILADVEETVTITETDEETFEEIHKPSKRTIPMLFVRGDGVILVSPPTKYVP

SEQ ID NO: 162512 - protein, 400 aa, Heterodera glycines
TTLPLPPMLCDTLGTDKNKRTLLVYGHLDVQPAAFEDGWNTEPFQLIEKDGKLFGRGSTDDKGPVLGWLNVIETMQGLGIDMPINIKFVFEGMEECGSDGLDECLEQRKDFLSGVDFVCISDNYWLGKQKPCITYGLRGLSPFAIEISGPNQDLHSGVYGGTIHEPMNDLCWLLSQLTDTKANSLIKNIDKMVAKLTEEERNTYTKIDFDLNGFKKDVGVEKLTSEDPKQILMRRWREPALSIHGIEGAFSGKGFKTVIPSKVTGKFSIRIVPDMVPEEVDKIVVDFVSEVWKGRGSPNKMKILPLGGTLAWLGDFKQPHFQAGVKAIKKVYGVEPDFTREGGSIPVTLTFQNLTGKSVMLLPMGASDDMAHSQNEKLNVTNYVNGMKMFAAYIFECAKI

SEQ ID NO: 162513 - protein, 138 aa, Heterodera glycines
GTDSTNNGHYTDNLNIAAPGVVTQHVCKASNLNQFQLSQINSLHPDTGVVGVYLSTEGTKVLPFVKAAAQGLREMASKPISDELLQACKLLAKGTALTPDEFIALLKTVTADDVKKAASPTLRQSPHLAGEVHQAGPT

SEQ ID NO: 162514 - protein, 416 aa, Heterodera glycines
KLNLTMKRFNSWASQLENELEGWKDGCPCDFLPNMSPISDANDSSSLSSSSSWSSPLLHKYRLLIEPGNSPFEYVAPGVRAVRRLWNFLILQENLAPIFVRYSFAKAKDKIASSVTKGADLNSILNVIKLVHREHDPIVAFAANSIRPGVMVVSTGRELQELSIDRVLDEHERVVSRLQHYPSTSSFLLAQNWAELDISMQQIRRDPLRDNDDYQLLIPGSDGQPGKNIPTQTSAHLRKRLFSGVRRLEAHSSLPYYASGSSDGSVFLWEWGVEQPVFVARVAGQFAKVAKLAFAQNGARFAAVDGDGLLSIWQAQPGVPAKKPYFIQKCHTKFASDVKFLGQTSTLLVTAGLGMNDQNITLWDILMPHSKCAVHSFVGHPDGAFCVAYQPNTQSLISGGKHGEICIWDVRQRQLR

SEQ ID NO: 162515 - protein, 146 aa, Heterodera glycines
LVHCIKNAKPIIVNIIALANLGTGIKLNSLTITECEFKYNPENSMPGYQMCKPHQSHGIIMGIRENDMSGDEKSAIKKFIEIIKGSGCPGASYIGLNFKQGKSMTALIFWTGKVVITGTKNNSEIEEMYHHILPYLKMAQKKLGIR

SEQ ID NO: 162516 - protein, 192 aa, Heterodera glycines
MKRNGNSICSETKPPLLELTPKNALTFRGKLGHVGSVSLDIKNCEICSVYFKVKSNANHFYSVRPNTGVIGAYGRVKVVIQLHDDSLAKLDEIEENKHKFLIMAAIVSDASIGTEKFWKGKKEGMDGIYSSKMKTEVHKVCRWEGGKGVLSQQNSEENVPNGKNSVSVEKVPNQILELCSEKEAPNQFSNLE

SEQ ID NO: 162517 - protein, 204 aa, Heterodera glycines
  unsure (1)..(204): unsure at all Xaa locations
SIIITFHNEARSTLLRTIWSIFIRTPSHLLKEIILVDDYSFDATIGRDLFGIDKMRIIRNRKREGLIRSRVHGAIIASAPVLTFLDSHCECNVGWLEPVLQRLVENDKAVVAPVIDVINMDNFNYVSASSDLRGGFGWNLVFRWEALGREEKLFRXKNPKKPIKTPVMAGGLFSINKKWFDALGRYDTKMDVWGGENLEMSFRI

SEQ ID NO: 162518 - protein, 139 aa, Heterodera glycines
NLSKVGSGKSSLLNAILGEMHKVYGYVGIRGTVAYVPQQVQILNRTLRENIIFPVTEEEKPDEQHYAKVVKACALTADFSVLPNGDQTEIGEKGINLSGGKKARVRVMERKEYGRTKKLGIVKKSAKDISTVKDFSPER

SEQ ID NO: 162519 - protein, 159 aa, Heterodera glycines
NQSSPLLMPRSTRATMSCSSRATRSGSRFCGSGGPAPRLYIWSGGVLPTRLTSRLNSLFSSTSITTFPSSISSAAHPIARPNCFFTSWTSESGSSIGSGSDSEGGCVNTSVGAGPSTSGTKSCSLREEVDGTLRFRGGTTSRTALRSRLRVILSVAPKS

SEQ ID NO: 162520 - protein, 125 aa, Heterodera glycines
ISSPSSSSDSSFSSPSSFSTFFLAFSSSSFSTSLLSAHFDDHLFVQFCLQNFCELFGLFFAQFVNIKRIYSQVFFAHVREHRGDHTALRLNTIGDFDAQEQAFHGRFHNVIAEVHLISSLNIHLH

SEQ ID NO: 162521 - protein, 122 aa, Heterodera glycines
PTFLQLRRRSFPTPNSASFSSTVEHHLPSPNSARGIYGFALYLGVWILFVLYLIWALVPDYLLKSLHLTYLPAKYWALAVPSFLVFSIFAYILVNFFFNLVNFHSLYDQETTKFQLVNDFLD

SEQ ID NO: 162522 - protein, 152 aa, Heterodera glycines
FCRSDPSDKVRSLCLLSAEQRVSPTEYLNLRNKIGGSFILLDVRPPTEFEICHLPEAENFPWEELRRAKMEMIIDKINNSMERKSPTINGAGNNGKTKVLVVCHHGNDSQLAACHLHKQLSEAGIGDRFIVRDIVGGMDGWALEVDADFPRY

SEQ ID NO: 162523 - protein, 143 aa, Heterodera glycines
AAKRERRALSQRPRRRHGAGSRKNSAQITFPLNWSNGRHSVRRAKAWISADLHRDNQKQENILLSVLRNWAFLRRVLYYAVCAVAMGLDMIHTIKIFGRIHITETALNALNSACRVEVGSGPEHSRHLVEKGIKQTSLVVSEE

SEQ ID NO: 162524 - protein, 176 aa, Heterodera glycines
MPTPSRARVYADVNVNKPREYWDYECHQIRWGNIDDYQLVRKLGRGKYSEVFEGVMVPSEQKVVIKILKPVKKKKIKREIKILENLRGGTNVIGLLDVVKDPVSRTPALVFEYVNNTDFKQLYQTLSDYEIRYYLYELLKALEYCHSMGIMHRDVKPHNVMIDHEKRQLRLIDWGL

SEQ ID NO: 162525 - protein, 629 aa, Heterodera glycines
MVNILTIRWTICTTLRNGAWPCARVLMLWQPYRLLLLKRMLVKMEMTTQQHPTTYWRGMAVFYWKQKAVSYRSNFYKKFKMPNQKDGVTGGKRIEQELAVFDLPFYIVALAFFLKAFFRLYDLLVFVPFKLFADPELEKERSRERKAMPIDGKPTSSWRHVDTIGTALYTELFEGCPTLGKIWDKAAQLHRGHNCMGTRDILNVVEEQQPDGKAFQKLALGKCNWMNYEHVDEVIVEVASGLSNLGIVQGQKVVIFSETRKEWMISAIACFKLGLPIVTVYPTLGDEAIAFALAECDAVLAFTSRPLLSKVFSSVKDCPQLKRVVYFSELHALAEVAEKAPDAIKEAFKSIGRELYSFNALKALGHSQAKLERNVQPDDLAMIMYTSGTTGKPKGGLLSHRNIIPTASGQSAVISVSTSDTIIGYLPLAHILEVCAEIICLSKGCRVGYSSPSTLHDRAVKIKRGTTGDCVELKPTLIACVPAVMDKIFKAVLDEVKEKSPIQREIFRICYERKRNRFEGGYKSLVMDSLAFAKISKMLGGNLRFVISGGAPLNPETQRFMNICFCCPVVQGYGLTETCGGATLADEHDLSTGSVGPPLRSCEIRLREWEEAGYLPTNSPPQGEVLIHG

SEQ ID NO: 162526 - protein, 115 aa, Heterodera glycines
SESWAVACTFFSMLFGYPPFHSSNLESTYSRIRRCDYSFPVRYPPLSKSAVDLIKRTLIREPKQRLTIGEMLAHSSLNPPNLNRSFIDGNNLQQFSRSASCQQFTTLAKTVVLSI

SEQ ID NO: 162527 - protein, 257 aa, Heterodera glycines
MSSGDEATTPALTSGGGASSTRTAGGGSAFQRWGGNRRGSHLVGWDSARPQSAARQQQQMLERMYSKSELHEYQQLFKMFDTDGSGAIGCEELKGAMLSIGLQADDAEIERLIKEVDDTEMVRLICDHSLPSDCLFLLPPISEIDFPEFCQCMKRSQQSGGIKGRLSNEEVSRQCFEVFDQDSNGLITENEFIYVAKEVGGFSQELAEFVFRELLGDSATGQLDQSLFSAIVDDYLFSDLASGGGNDGTVGNKSPKI

SEQ ID NO: 162528 - protein, 297 aa, Heterodera glycines
AVEKAAERGGVYPEVLFRVAHHWYDDLYLAHLENTQQQQATTTALPPPAHPQPTQRIAPQQCVVRLMMPSPLHHSHQSQQHFFPVHSAAASTSAAVVFSPSVPPPPTPPQQFVGPNVVIHPQQHNLSTGNNFIQYSHHLQLTPTAVPLFHGQTAAVSMAPIFHNGQAPSVSSCCFLSLPPPQLQAVQPPTVVDHKQTSQPHLQQSVAQFGSTIGYPHHHHVTAHQPPLSTPPPPLMLMALPGANVAASAFPPRHILQPTPAQHQLPNYTQQQQQTANQQWTLQKGIGKQQHRIEWRA

SEQ ID NO: 162529 - protein, 201 aa, Heterodera glycines
TARADIACNNVIVALDRLIDVPQAPDKKAICVLANNRADSKEGVGTVMFQQKDGEDVRVTVVIGGLGPDHQHALTIYQFGDLTVSSGNFHSTGKHFSHAGQKHSPPEAVSRHVGDLGNITADSKGVAKRNWSDKVISLFGQNNIIGRSVAVHARKDDFGEGTQDVIRSRESGNAGPILSWGGIGLAFDTNMSTCSEDFQRE

SEQ ID NO: 162530 - protein, 230 aa, Heterodera glycines
DARFQLREQLIMYCINDVAILRESVLRFRKLIGEHTQGLDPFLVSSTAAGLALSTLRRCFLPFNRLVHSPEGGYLRGRRASAESRRYIRFFELENPGAQVQCADWSVGEANIEDTGYRVDGLWRREPPLRPLAIEWMGCYYHGCPDCFPNRRQKLAAGRTAEDLYERTMRRLFELEHTHGCELHVVWGCEWKERLRRDLELKQRFEAVFVPCPLDPRNDALRGGRTEPFQ

SEQ ID NO: 162531 - protein, 187 aa, Heterodera glycines
PEKVGSDQLAIQVFGGKKVKLQSGRYKVKLKRLDGEWESIELSEVPPICTPIRTEFVIPGGTPGQHCSATDTVQPQLLIGIRRFWDFVQGFRKTAEGTYLIDTVFGTVICGEQFQTTTGVTPDSSVFAIPPCGEDERDQMPSVKAIEQFWSVEAIGIRDDPTQDADTEAIIQFERSVRQHDDGRYSI

SEQ ID NO: 162532 - protein, 193 aa, Heterodera glycines
MSQKCSQSRTLSAFEIVPVRGCKLSKSSSRRPEFCECCPIPRSGHRVFADSDFIYVFGGYNPFHSPDSTYTDFWRFNRLTHLWQKCGLSSSDPTTQLPNSLASFALASSSRPSECFIFGGTGIPFGLAASNELHRIRIDLLGNVNVRTEPKQSYEQRQNTANIRQRGRSGGEAADDAAEQRLMPPRIYGHAMC

SEQ ID NO: 162533 - protein, 211 aa, Heterodera glycines
MCSGIPEGTYELKIGASFLCSNKSRPPEFNTLRFDFKPASISSEASEAYVVQSQNQNENNFQVVVFGEAQKKTIFKGAKKEIKGDKECLLVYNRKSKELCLERVSANINVKTTRDTDLDQKAISEIERLQKRRRPKQYPPSPKAPVENATAVEPPAEQRKERTFSTSSAGDEIDEDDEENVSALEQLMAPTKVERSEAEEDIFHPAQQRPK

SEQ ID NO: 162534 - protein, 212 aa, Heterodera glycines
MSSVRRMLFLLGRKCCCSTVPCSATANGFGSIQRRRLWTSMARLSSSGPFICMMPLKKRQMFISDVYKHDHFLHFDHLHIDNIHCARKLVVHLRPSERTLLLQALTELNAEAKTDGNGHSDHPPSPAQMKQLFFVNTIPFVGFGVLDNMIMILAGEYIDLYLGTLLCISTMAAAALGNIISDVAGGGVAHYVEQFPRHLGYKHPVLPPKQLE

SEQ ID NO: 162535 - protein, 201 aa, Heterodera glycines
  unsure (1)..(201): unsure at all Xaa locations
MLARMKKLLSSGDHADVNFLIGNEDSKEILLAHKAILSVASDVFAAMFRXDATNATRATVGKPFLRPVEITDVEPSAFKVLLNFIYWDDLSERNGDNAIALLYAAKKYKIPELVKACVEFPVSELRDIFSALVRTRILEEEEFAARCLNYIDQNADFLFRSNAFLQIDNKLLCELLGRDQLLIRREISVWIAALRWADEHC

SEQ ID NO: 162536 - protein, 125 aa, Heterodera glycines
  unsure (1)..(125): unsure at all Xaa locations
MTSHFLVGVAAFGAGMCFAKTYMEKPKSEDDKEAPKKEEATTGGEAEEKAKKKDKKGDGAAAADKKEEKRXDKHKSKEGKSDDSNRRSKKDKHGKKDKKDKKKDAAEPAANAGEQSTAETTQADE

SEQ ID NO: 162537 - protein, 202 aa, Heterodera glycines
MATKPLLYCYWRSSCSWRVRIALHLKGIEFDQRIVNLLNGDQNKDEFLSKLPFAKVPVFVHDNLVLSESMAIIEYLDEKFPEPNPLFPKSAEDRAHVRALALQIVANTQPLQNLGVLKHLSEEPAKRNAWARHWIEQSFNVFEKALAKNASKYAYGDQIRLADICIPPQVYNAKRFGVDMAQFPIIARLDETLAEVPAFKVP

SEQ ID NO: 162538 - protein, 161 aa, Heterodera glycines
MPVFALQMSANLVGVTDLRPSDYDDHRWYLKLKCSACGESYPSEQYANTRETHTLTKGKGICHISAKCSFCGRINSLEILIDSYASYSADKNRLFQTLVKFECRGIEPTSFDPRIGWICVGTESGSIFDEIDLNELEWADYDEKNSSAVEINDISFRFVRV

SEQ ID NO: 162539 - protein, 174 aa, Heterodera glycines
MANAEEVCPTYSEAFSHGNDDGSFCTITEFKRNKLETEARKNWDRFYKRNSDNFFKDRNWTKREIEQMCAKDMELSAPLTLLDAGCGCGNTLFPLAKFFPNWTFCGVDFSSNALSLLQQRAVQIGTNIHTELVDLSGDTLVNFSSLPKADLITLIFVLSSISLEHHSKVVQNLR

SEQ ID NO: 162540 - protein, 262 aa, Heterodera glycines
MLSEIPLPHQKGIVDPRLPCKIQIVGRANDVAKRFEVNLLSQTGEHLLHFNPRFDEHCVVRSSTKDGQWQAEERGGTNPFVAGQPFSLDLLVEQGLIECSVNGFQFCEFAARDDFSQLGAVSVGGDIQLNSLEVSTAEGPAIAHEGGDKGPREADEENAQEQPPIVMPAHPEPQPVPAEPTPQQPQPPPAQGPLSVPYQAPLHALLQTNRMRVVGVPRPGAQRFTVNFKTHDGETLFHFNARFDQNCVVRNASVNRQYAPEG

SEQ ID NO: 162541 - protein, 211 aa, Heterodera glycines
LLMYIRELESPGELPLVLLNAPRSCCRPTKHEQFRAVLNLRRTAQRLTVENSRLNRMNAMLVVLFQRLTGGVLPHQAVPVAGAFGQKQNQQPANAFAVPPVVPVVPVNANNNNRHSYNELQRELDTLTGTVDVLTEQNSRLAHTNGVLFGHVFRSVPPNVPPPFVPVAQAVPQHQPHNAAVALPHNVNPNPPGVFQPGQQLFDDNFVDAYL

SEQ ID NO: 162542 - protein, 144 aa, Heterodera glycines
FCVSPTKFAVRGAMECLRVELKERGLEDILCTTIYPFYVRTPMVTSKGLRPVARWLPFLTVEECAKSVVDAILKEKVNACIPWWLNSFVALNGIFGINMNNVSRDFLDIHFEPSNYEDGQKSFGRIRNSGEIGRKRRQKRGQYK

SEQ ID NO: 162543 - protein, 183 aa, Heterodera glycines
MDRRINKTARNRTCSMVTVTTNGRQQPRKIDYLIKKFDALGSGRPPMPTSESPSTSVDSQFLPVTKSASTTIASALGSGRSPMPTSESPSTSVDSQFLPVTKSASTTIASALGSGRSPMPTSESPSTSVESQFLPVTKSASTTIASNPSDCALTPQQKYCRKRALMEPSQHELAIIRNVLSFD

SEQ ID NO: 162544 - protein, 208 aa, Heterodera glycines
MVTVAANDKNVDEPNRYCQSKGCKKPVEGNLRCPTCVKMGRPDAFFCSQTCFKASWLEHKLCHKDDSSNINEYNPWPLYQFSGTLRPAPQSARRAVPEHIPWPDYALHPEGVSLEERNARNSGQIRVLNEEEQLGMRLAAKLGREVLDEAARAIEPGVTTDEIDRVVHQACIERECYPNPLGYYKFPKNCCTSVNQGICHGIPDKQAL

SEQ ID NO: 162545 - protein, 203 aa, Heterodera glycines
MTSKIESTIASSFRKFLFWFRYDGSKFPAMAKGSDSRNGPSVMQVVESCLQKLFATENSDQIKTFAISRTDAKVHAIRSPILIGLPVACDWFSQSELARTEFLLCFNDQIRNNGFTNAIELLHVDPVAMGFHPCFHVSYRRYIYRLRVISTEQSLNYPNRFFAHLSHVIPSDPSLASLSEFNYSWTIPPTFNIERAQFVCDLL

SEQ ID NO: 162546 - protein, 118 aa, Heterodera glycines
PCKVWHVHCRIELHHSLGFPHDLSQIWLYFSVHDSELIEERHINGWRSKNHRKTILKNMYTLPFFAQVSDRKRDDTLPLPYEYPYELPVGRKLPYELSKILLILEQRTNTRTTDIPTP

SEQ ID NO: 162547 - protein, 235 aa, Heterodera glycines
  unsure (1)..(235): unsure at all Xaa locations
HHFSVLFVLSFFSFPLFFAVFVSSAAEQNANLQKQQQLFTIEGKTVVNAELQRIKPNWKAGXRIFLDYGKFVGFIRQDGSFIVPDVPSGSYILEVASGDFQFESVRVDITNSGKIRARRLNLVQPNVVSTLPYPVKLTARHPMRYFRVREEWRVTDVLMNPMMLMMGAAFILVVLMPKLAAQDPNVQKEMQNMQLPKVDMPDMADMLANIWSSGSNKKGSRKQISSGQSTKRVTR

SEQ ID NO: 162548 - protein, 117 aa, Heterodera glycines
AANCGRTAAKTDGDGTHQKRWCPSFFCLSPPFAPKGQHLRVGWCGCRRFAQRSNCPLLDLLILGRWRLNNIQNNTCTHTFHTEYITHHIYINTYLFLIFSIGMIYVKLTTPFNVICE

SEQ ID NO: 162549 - protein, 209 aa, Heterodera glycines
EYYLNLAKQLVNANAHILSIKDMAGVLKPEAAKLLITALRDQHPDVPIHVHTHDTSGAGVASMIECARAGADAIDAAIDSMSGMTSQPSMGAIVASLQRTPHSTGLEMDSISRYNAYWETARQFYQPFECTVTMKSGNSDVYNHAIPGGQYTNLQFQAFSLGLGEKFDEVKKMYAEANLALGDIIKVTPSSKIVGDLAQFMVQNKLTKE

SEQ ID NO: 162550 - protein, 200 aa, Heterodera glycines
MDSPPTSTSKLMQIPLLSAKRRKEVLNFQWPFPKHPGLLYRLGSNAVILAVFSLAKLVFCFNKILVQPEQKKLVLDLLNDRNRPLVTISNHRCVVDDPLIWSMFTFREFLSNISRFRYILTAHDICFTKKSHIFFFSLGRCVPVVRGAGVFQEGVDHCVDMLNSNGWVHLFPEGRVTTESGPIKGGIGPINFRNRTNPPI

SEQ ID NO: 162551 - protein, 217 aa, Heterodera glycines
QRLLPSPAAAFVPSPNGTVSVPSLPSSPTTRTTTTAMISVPAIATVTATSLASSRVPSSSSPSPVAIHPTISTKAATSSAPIILLPNKRSKEGHQSQKQTMAKEMATDFAAESKGGRESEIRRAPARQNAEDEWTKANELDEKGIPPTQRTAPKLSTTTPATTTAHFWVIKDPREARRERLLQLRRKLDPNPEPPTTTTTSAPLLPLSPQFELHRIR

SEQ ID NO: 162552 - protein, 297 aa, Heterodera glycines
FSGYCYKAFTNADKEVKYSEAQKICKSDGAELVSMHSELEREFVNVVALTAAKKYEYNAKVPGLAFYWTSMQLEWDEKKLKNASWADMTPMDYLSPMEWGTKKRPVYVDNSNGGEYNKENENCVFIGQWPREGKQYLKLDSAVDKYGLDVLWRDEVCEKPGEDCPRGAVCKKRATVGECYGTGAYLLDAAEEEEMKKLLKFITVGSGTFVYAEKNTYMVLLLKDLYGKQMKEEDRKKVCAYYKAEYVTVKAEPNKVQEYVDKVLSKQKQMYADASDHMLCKFSGTLGGCGDYCKTGY

SEQ ID NO: 162553 - protein, 203 aa, Heterodera glycines
TKANRRCCRGRICCVSPAKSRNGTSDASPDGSIGACPPVSRRTSTGAASAVWTYGKHRGTLRSTILNIPLHQCPLCEYGAAEARLVQRHMRNNHTLKECEASERTDERVKKTKGQTKFKGMEPIANVEKHRAEFSELHNQCFPGRPKRLSNITIADESRRAKCRGCAQVRDSEGGGDKLPFDGEKLGRFQGMRKWHFRFHPFF

SEQ ID NO: 162554 - protein, 80 aa, Heterodera glycines
MHSFKLFASLFLVLCVVSLVICQDKPAAACKPPKSVGRGNLALTRWWWDGRSCKQFIYKGQGGNTNNFPSKKLCEDVCKP

SEQ ID NO: 162555 - protein, 208 aa, Heterodera glycines
MEQLSAVQPENKIEIEQPNEGDADGEQQPAEPIQLIDKEREYLAVKAASRAVISHLSEWSTPIEMRFAMDGTVETKRKMRRRFCIDRQQMLHDIECMYAPKIGIKQILNVDIVGCQDEISQATENVYQMVYDGGFFRKQTGLCNFKVLKPTPTTKNVLDNVINGILHGCLIHVQETILKNKEMVKKLAKCLAEKENNRMGEAEISDFF

SEQ ID NO: 162556 - protein, 211 aa, Heterodera glycines
IWSEVSQLKGMPLLVAGNRTARSAYGSCQECCSGGAQGQPGQTPQTPCEQVHPPPCTPCPGGQPGNNGPPGPPGAPGAPGQPGTGGGQPQPGEPGPPGPNGQPGQPGQPGAPGQPGQPASPPPTEPAPAGPPGEAGAPGQPGQPGAPGQPGAAGQPGPKGPPGGPGQPGNGGAPGQPGQPGQPGNPGERGICPKYCAVDGGVFFEDGTRRR

SEQ ID NO: 162557 - protein, 173 aa, Heterodera glycines
MIKAYQRFILRFFFVSLFLLSINAQRYGSHSYGSGTYGTNYWSSSYGNSRTQPSYGYGGQQSRYGTHEQNGGENGQFERQNAWRGGGGQWGQNQQNWGQPQQQQGATAAVEGGWGRRQQQQFPSPAPPKTQNNWDNSDNFAPSTAQNRGKLRVDLPPGAPGTMEAADADQSSK

SEQ ID NO: 162558 - protein, 119 aa, Heterodera glycines
MNRRVDSSTDNDGQSASTLRQANKGGTRRGGTKRQDKANRALHMRLARLRQSQLAAKREFERNMQMKANNAAQSPASNCFDRAPWCSGWIQSSPLICRTSSIYMRQDCAKSCGFCSSSS

SEQ ID NO: 162559 - protein, 209 aa, Heterodera glycines
VSLDKQTPKLTEQMIRKCQVLPIDLPRGIETQRDKGMIQNNNPFFRAHGVRVETNMMQAEAQHLYPPALGFSAQNEQIEPNNRGVLDFRLADRGQPLPRRYLLPCEFPEVWTVVIVQNSIRMDQCRYFCENLMRCAQARGVQMGKPRIDPMEDTSLNYVRERFDFYSKHRCQFGLFIATGKESTRVGDVHHVFKLQEVEHGVLTQHVSP

SEQ ID NO: 162560 - protein, 116 aa, Heterodera glycines
ISKNNIIVYILHHFFRIIVKLSSHQNIACLPFFQTYDRENCILTPAPCTICAYAATHGQLPAKLFDFTKEAVAVLESIRFINNSGVAYLAELFRGQLGKKAVKRKVRKRKQSTDNK

SEQ ID NO: 162561 - protein, 171 aa, Heterodera glycines
MKPLKIDVDFPSNSHPTSQELNQDCIPLYEMLEFEELQFPNYYLSEQLGRGAHATVMPCHFHGKPAAAKLFNANVDFKTIQKEAKLLHEFRHENIIELYALFHGTMSGLVLELMEGGSLSELIHQRKSIVYQNCHVINWTFQVAKALEYLHKLSFIHRDVKPSNMLLSLDY

SEQ ID NO: 162562 - protein, 293 aa, Heterodera glycines
AFFGVVMSTVATVICILSVPLAYQNFQQIGTKMQNELEFCKQRSGNILRELTRTQTLAQVVGIIGNARGNGAAKARTARHLVYGEAGVSGSAAQAGLCCGCGVSPPGLPGPPGPVGQPGFDGVPGAPGQTGPNGQAGASGGGSFGAGCGECQPAQPGLPGPPGLPGPSGNPGLPGPNGGQGPLGPPGPPGPDGQPGESGQSGQPGAPGRITGYGPTVVGPPGPPGPNGYPGAPGQPGLPGSFGQPGGPGQPGDAGKPGTPGNPGGNGGPGVAGEIGNMGTCDHCPTPRTAPGY

SEQ ID NO: 162563 - protein, 199 aa, Heterodera glycines
MFSLQAIAVPEIAKKLKCTLIPGDGVGPEQAYAVQDIVKATGIPIEFEEVFLSEVYYSRSASIEDVVDSIARNNCVALKGAIQSSLDDKTDGLNTQLRKRLDLFANVVHIKALEGIRTRHNKMLDFVIIREQTEGEYSRMEHELVPGVIECLKIMTRVKCERVAKFAFDYATKHGRKKVTAVHKANIMKLGDGLFLNVC

SEQ ID NO: 162564 - protein, 203 aa, Heterodera glycines
MFRRFISSAPNVAKVFGGVGLSTVVAAAIPDVELKKKPDWYQETVHRLEKTLKKLSTYAYIENSDILEDAKDILMRCENVNNCDISWRLGRALSEKGDLFSVVDSENRIEFFAKAIPHFQKAFTLEPKNGSAGAHKWYAITLKRLRLITSQHPYVKNANKEVIEHLEKAHQIDPKDAITCHLLGVECFENGRYDEAMKLFQAA

SEQ ID NO: 162565 - protein, 179 aa, Heterodera glycines
TMAVSHPQQKQNGRHSGGGTVPKHIGIGRLPTEDNGTTSGGNPPHQLDDADDNHYQFQLPLAFRSSLVHPTTTTAQNVQHHQLLQQPQLNATIPSMECVSVIHPKREQQFSASVDQFVDGDDDQFKTEPLDLSLSSARTKANENGTMGGNGATVAGGIQRRKRTTNKRQMAEEMCETTG

SEQ ID NO: 162566 - protein, 196 aa, Heterodera glycines
IEQPISRHLRRLVTSITLFFTIILLVVYVPVRVIKWLCPSTLPYVFSGSADTPLVEYSFELVLLQVIMPSILEYSKAFSLLKRTVRIWCRVVGGWLSLDSYLLPADKEKRNGGQQHREQQRQRARERAQLHREQRNLGAQHQALLRFRDSSVPEEYVQPNLFPLRISLLLFFVALPTIAISLLFFLLPGTIGRFLL

SEQ ID NO: 162567 - protein, 143 aa, Heterodera glycines
  unsure (1)..(143): unsure at all Xaa locations
SCSDVGGQSHQGPFHEFIDDDFLFEKAEQHPPIVVANPSAPNGPFKIRDSSAEFHNDVNLLGVGGQKDVFRKLKDVFGFSYFRFKQKPAVVAALLGHDCFIVMPTGSGKSLCYQLPAVLHPGVTIVVSPLLSLMXDQIIKLQN

SEQ ID NO: 162568 - protein, 146 aa, Heterodera glycines
RSKSFTFTFVQQSPSNLSTRNPVAICVQMSTDVNLAPCELSFAVDQFDDPLTRQAISGAVDQARTLFAQRHTAIPNIVDTHHILVSRSPHGFTEGSSVSAGSFAAFFSLMINRCFRMDDVAFSGQIGLERQVQYVQQNCGESCRHE

SEQ ID NO: 162569 - protein, 181 aa, Heterodera glycines
KKIMEQLDSTLNAAKNETERLAEQLKKSAEQAQKEVRERTLHQDPYLRLVYQLQTAHLIALGIEVLTLYLGWRDVNFVWLLLPLLFCAGAIWIVSQRWYHQMDGRSDFNKVLSADKMPVRAKAASCLVGGFVLSLLAQWTAPTMGSTSIGLLFSLSSHAAVLVGAVCSAIELYEGVKLKNR

SEQ ID NO: 162570 - protein, 213 aa, Heterodera glycines
MECIGCLAFRTSFSVLLRPFSSANFGQGARDIGSRHNVSSRHSALLEKALAPFVPRTAKELAEYLAKNVLYHSVGDVLVVHKPYGVGSLGYVQKEFGIFPTTQYKFKDRMDLFNGVKKDDSVTLEDAIPHLKEIFHEPKLHFCTGLKRWVSGPVVLPCSEKAFKNIGHSLFQGESISHSNEHWTAQHMHRALAICISRPPRDEGAVHGYATFQ

SEQ ID NO: 162571 - protein, 93 aa, Heterodera glycines
LPNDEEQQKASFSNFMHIKRCDSGQVIDFIHSHFVGMTSVYSRVCLSVNCMCDGWVKKLINEDKINIRVQWESEREEERTIMMIKHFFLNFII

SEQ ID NO: 162572 - protein, 204 aa, Heterodera glycines
MFICGGSRLLGNWRPEKALEMARETEDGEENQSQQKTNSGRNQSSSSVWRASIELGPEDSQRLLRFRFFLGFPLQIDPSNCQSSLSLLVVRWEAKMSPRCILPSIESNSMGECNKGVTSEFGSYGGRDRLIMDGWLHGREQRQIFLRMFGTALRFFDPKLSERRFLIRVTPCDVRMDKEFDFANSNGPVGWRTPSLYVHSLDSL

SEQ ID NO: 162573 - protein, 151 aa, Heterodera glycines
KRVMANTFPSFAFTYFFVELPTTSSIVWLIHCLFNRGLRLLLLLLFCQCSSSSCSSPVAAPNRRMPTAVFHCAALPVRRKMPQCTAARSLLLERSGCESLITNITLISTNFEPRTRIRTKVENSNFLFHLCFLAFFSRVDPSQLTTNEGNA

SEQ ID NO: 162574 - protein, 236 aa, Heterodera glycines
TMDHRYKAIIIGKSDQHLSDMFLKLWLIGEWKCVDIKFGRYGGYNLLDPVDVGDFVELYDGGGPIRRLPPGPALPKTRILDGSNGTRSCLKVKVNFMPLDFLLFPASAKEKNLRMAMSAELGPIPIANENSFKLHCFYRGVATLFFAKDSKEEMIAEVYNTPWLIKSDGASLAESDFSTIVHTFAFCQSQDVHRQGLVVDASLKDVFFVHCAELPEMVSLRKDITGGRIAVGDWIE

SEQ ID NO: 162575 - protein, 209 aa, Heterodera glycines
  unsure (1)..(209): unsure at all Xaa locations
VIEKKSDPLPISRNTSVTIVLSYDLMVSKAKQLKSNSIYVVVFDECHLLKEQTTQRTKVAFELSKIANRVILLSGTPALSRPSELFTQVRMIDPKIFPSWVKYAVRYCGGKKGRFGFEAKGRCALCXNPDELKTVMDKIMIRRLKKDVLDDLPEKRREVVYLSGDAIDAKIRELKKARDACEQANRYSDAKTKKETFAEYYVQVAPFFP

SEQ ID NO: 162576 - protein, 238 aa, Heterodera glycines
  unsure (1)..(238): unsure at all Xaa locations
QRDKXXTXERXNXTEDRPXXXXXARNTXXTPFFFNNNDVMPSVMAVLTQMKMFCDDLISGRWTGWTGERIKDVVNIGIGGSDLGPLMVTEALKPYQQGPNLHFVSNIDGTHLAQVLKKVEPKTVLFIIASKTFTTQETITNAESAREWFLREAVDTAHVAKHFVALSTNGQKVEDFGIDKKNMFEFWDWIGGRYSLWSAIGLSIAVHIGFDNFESLLGGAHLMDQHFKEEPLEKNIPV

SEQ ID NO: 162577 - protein, 214 aa, Heterodera glycines
KSGMDVWADIAKADFMDERFSRVITANKAYNLFQNSIAELDERSFRAQAAILNGLLTHHLDFIHGKCVDLRKIGLLLDHFDRLVLRSECLLAQNANISLLRCLVKCSFYCRFADFLLCSSIYQQSFNEFRLLAMAMFCYGLALKWACHKSVKGSDGADSALLSLCAAELTTLLRTNLHADSQLEAEMHECDRNMLLSFLRCYSSSVPYKDCAQF

SEQ ID NO: 162578 - protein, 92 aa, Heterodera glycines
MNMGMPAGATEVPEGVVQLNVGGTCFLTTIDTLKRDSGALLSQLLTLEGLEKNSKVAKRMSNGTIFIDRDGELFAYVLDYLRTGKLLLPENF

SEQ ID NO: 162579 - protein, 148 aa, Heterodera glycines
IIHLCSRHYLIFNCDRIQTYNKNRRAKNPKLNTIVISVARINKNGSSKIIRISIIMDGKTIKFIADSGSDINIIDEIAYKCIGSPTLGKSDEEGIFFDGRRCQFIGKGFATFKFKGIEVKQPFYVAKAGALNLLGSATMDKFGFLEGI

SEQ ID NO: 162580 - protein, 77 aa, Heterodera glycines
LICIFPLFVKMLRLIIIKIKFYFYFLIYRQIVKRTKQYKTDLDSQSCTAAGAGIGCCCLLTQIRAELANRWAGIATG

SEQ ID NO: 162581 - protein, 196 aa, Heterodera glycines
  unsure (1)..(196): unsure at all Xaa locations
IGSSLHTDRSRNTNRPRISRNGSVPGSDGRCVQRAGTYSERVDDSPLQGIPRSRTIIAMSDPNHGKFSPVYQPLSGKDKHADFASVARVQPRTSKGXHRPVIAQFRAAEHRKSLXEVVPTEAMSQLFSXARVSLVIGINQTNRSTNXERPCTTIHRIMRKLSICQSLRCPGRVSFPVLSQIKPQAPLLVVPFRQFL

SEQ ID NO: 162582 - protein, 297 aa, Heterodera glycines
MKHGAKLDAIVTDLVLQPMEEKMETAEAEVRHQTEDIAVASSTCEPELSVHAQFLLTDTLNGLKRTLDDMAQEHKHPIHHLISRCGKAIDTRFFSDLSRLLKNEKEIETDSDNLRHANRLILEHLMGLGRTEVADVFLQESAMSSLEVPDIDNFETLRNIMDSFKRQDYLPTIQWMKANRGEDNDRHDLLFRLQCQHVIRLLETNGKRQALGYVKEMQDEEKEKYKEELKHLMFVVMTHPQKGPHDYLFNEGRRFELEWKLANAITDYRSSLSTMLNAGAKTVPSLMTMRAFLNTSR

SEQ ID NO: 162583 - protein, 227 aa, Heterodera glycines
NCKRMTENRRAAREIQRQQQKQQSLLKKIDFCSSNVFDLLDRPTVGTSLAPISAVFDAIVDAHLFGKNRYIDHTVVAFLHRILRLFRHSAIALKMVIWPQSVRAWHVMAQQIWPLAASNVCQLSVDSYVFSRLREFVSPSVLRDCANLRQIESDGLFPEGPPDDHPHASDGQALAKWLHTPRADGRPKLLNVEAMTGQFHEQIERLKENKQEDGRNKSKTPKNNFYW

SEQ ID NO: 162584 - protein, 242 aa, Heterodera glycines
VVRRQIRAQIGIIKIPEKYFCVRSVELFDECLFGFVPMAAVDNVQKGPIQHTLELKGGVKLFVGNWQQNRRRNRQMVKSRKGMLKETRLNTVVERIRHTTSKRLPPTAMEQSRTAKAKAGGWTTIGNFDVGTLQLAGGKRVVQHLLNRCALPAVHAQLKLQQPMVEAEHRRRTVIVGALSRFICAIARLLLVFFPVKPKEQFHRKQNQRGGVHFAWHWKPFAVGPSKFQCFPRWCRVRVAFD

SEQ ID NO: 162585 - protein, 207 aa, Heterodera glycines
DLLHVKLLSVIAIQFFPYLQINTNITTSGTLNEGSGGGTGTAAPGQNNTNGDITGGSSAAAAVAGNVHRCQSPIMEAEVAEDTSNKMFPSHEQSQQLQQQPQGVKKESVGSSNSTTSSTRVASVVHPIETTKDSKPKPSVKDNTTISPQALNSMLSGSPLITTPSIAPQQRHAPGDYTDAAVTGGKTRGGVPHHLHQYQQQQVVPHQ

SEQ ID NO: 162586 - protein, 83 aa, Heterodera glycines
PYPLCCGLGFIPTCGLALSRPPPLWLTISCILPAPSHSSPCLMSIKRSPHPRPPLGCGLGSAFPIQYLPTTWGFFVASGEGWG

SEQ ID NO: 162587 - protein, 261 aa, Heterodera glycines
MVTNAQNRPKVFIVGVGMTKFYKPKSSGKDYPELVREAATEALEDAGLKYDQIEQATASYMYGGSCCGQRALYEMGLTGIPIFNLNNACASGSSGIFLCKQIIESGNVDLMLAVGFEKMNPGSLEATQGMEGDRALPVDKHIQLMADTYGLQAAPITSQMFGNAGREHMEKYGTRREHFAKIAYKNHLHSVHNPKSQFQKNFSLDEVINARKIYDYMGLLECSPTSDGAAAVVICSERFLEKNPRLKGQAVEIVGIELGTD

SEQ ID NO: 162588 - protein, 89 aa, Heterodera glycines
WPYSDINFPHLDVSFQNWYDDRLVRRAQKKRLRIVVADQKAKGDYHSYIKMLTWMDDIERFYPQLAKTFTIGTTYEGRSIRGIKIESPV

SEQ ID NO: 162589 - protein, 89 aa, Heterodera glycines
IPALFMRRSPNRTDFVAKCLSLRPKASDYCFSKRLNTLKFHKSNKKPLNSLFKKFLLTNTLLKDITSWSSVKIALLLMIRGGFSFYLNS

SEQ ID NO: 162590 - protein, 166 aa, Heterodera glycines
ENQNASDPKIAKIAKPLQPRKYPFVELVPLMGKNHLDTVSERVRGIHPCVEERHNLFACLKKWDYDDMKCTKFSDSLFSCMESNKKIVAAHNEQRIKGEQPLHIVDEGSSVKAEASNILQADIDRLFRKWKQPELGTIQTKVMKRRGHMPYYVDYFHRKNMKGWRA

SEQ ID NO: 162591 - protein, 176 aa, Heterodera glycines
MIHIAIPSHRTLADHEDPYNKFTVYDIHVNGAFHASVRYNLLYSLHEKLIDLFGFRLNAPDFPPKKLWKLDAKALNERREGLAKYLQGVVANPDVSRHPVMERVFLDFQVKSFSAAVSRMTKLEIFLPDGRPVYVECGTDEATNVIMERFCHAIGLSEKNAKFFGIFLCRPRRGRG

SEQ ID NO: 162592 - protein, 196 aa, Heterodera glycines
MKASETMTNWSEQFQEYDPFITQPHPTNPWVSDDPSLWALNADNVEVPTERRVKRWGLSVMELVRDPIGRQVLESFLDSEFSSENLRFWCCIQDLKFSPNCQVKTKGQHILDEFLAPGAPCQVNVDSRTLEETLRCLEESDQALRNQRFAFSVSEEHVFTLMSKDSYPRFLRSGIYKAVLDAAKAKGGRKRIIDLI

SEQ ID NO: 162593 - protein, 183 aa, Heterodera glycines
ESTQEVASSSSASDPTTQLIISSLNSVRKTNEGTVENATKKTDNKELSTDEDEQQNVASTSTPEDGEFSKISRIRKRRYSQARIQPTRVKKVMQSDEDIGRMVASVPVAIGSAMEVFAEKLLLAAAESVQHSSTKTLSPMHIKMAVSRVPQFSFLEPMLRDVPMNPKMAPSFGQQSSSTSNGE

SEQ ID NO: 162594 - protein, 218 aa, Heterodera glycines
EVILAAETVYDCVHSCYQQNCSRAAFTHFPRSVCLMHFGGEVPLDQKCAEVDRLGTTWDFSSVPEVVEIKCVKCAGRKESVEKSTDNEQNIAKRHFSNDENAVGQQETTARHILNPQGLTLKCDGRVEFVASPVANLHPLNITNDVPADTAADCARKCFEAIHCTLAAFIPTPGHESAGGICLLTSDAGDVACAGTSVRHSPQHASTVPFLIKCIRCS

SEQ ID NO: 162595 - protein, 209 aa, Heterodera glycines
NATQWIRAELENSWPLEIIRHVKIGIKNPVTDPYSYNYTANLIDDIVSPRGPFGYVSQILVTNDFDRIENFWQRCPASYCAVVKGYKGINFSLFRHKVGHLTRAHKAERWFERNRDKMYDIILKNDKTSDLGTLMRAIEMEIGPVTSPDLFHSYVIAHVSTMTAKACVVPVGLSFSQFTNYSGYSMIEAYSHYRFPTTHDERFKLFLFI

SEQ ID NO: 162596 - protein, 208 aa, Heterodera glycines
ATGRRGRRGVAADAELDRATAAGGRRAPAATAAAPVTAARRGRWRGFWAFAANCQLNGTAAAAAAICTITATTTSAAAAAPATAARRGRRRAWGVAANCQFNGTAAATAATSAATAATAAARRLTTAARRGRWRARRVAADAELDRATAAGRRRAPAATALPTETCRVGRNLKAGEKRMGKGRDEKEEKRTFANEGHLDKGKHKLGGK

SEQ ID NO: 162597 - protein, 211 aa, Heterodera glycines
SLCRVMSGTLRIGDQLNVLRHSASSEDVWHSVKIGTLFLLMGRELLPVECVPAGRICGVEVSDGRWIGGQTLCSRALAVTEVPRMSWHQKFAEPLVRVTVRPTNAGMAEMEELRSALRQLSVLDSAVRVIEQEDGDLAMLTAGEVHLQKCLEDLKLLGQTEIVVSEPIVPFLETLIPDIRLPFSRILKDHETECFLRQFSLRITLRAVPLH

SEQ ID NO: 162598 - protein, 264 aa, Heterodera glycines
  unsure (1)..(264): unsure at all Xaa locations
ETPGPPGPSTETPGPPGPSTETPGPPGPSTETPGPPGPSTETPGPPGPSTETPGPPXPSTETPGPPGPSTETPGPPGPSTETPGPPGPSTETPGPPEPSTETPGPPGPSTETPGPPGPSTETPGPPGPSTETPGPPGPSTETPGPPGPSTETPGPPGPSTETPGPPGPSTETPGPPGPSTAGTSSTKTYTVPTTPKPPPCCYGCDYPVDCHTSGKDCDYSPLQPPYQSDPYPVGKCVFKNVTCAAPNTGKVLFMKLNNDPNSVV

SEQ ID NO: 162599 - protein, 215 aa, Heterodera glycines
LKATNEVDLYKPLKSYIDSLSELTEELRIEANDGLTELNKLRNRACCQPLDKHQSSLDIVARYYDQLCAMETKLPITPTQNPVSFKWKDAFDKGSLFFSRASLTLNDSSFERACVLFNCGALMSAIASNQQTNTDEELKTVAHLFQQSAGVFSKLKDTVLASVHQEPTSDLLPDTLTALLTLMVAQAQEAIYIKAAKDKLKSTSLLKIAAQCADF

SEQ ID NO: 162600 - protein, 210 aa, Heterodera glycines
SCRDILTRETRFAELLYAHAAQLALAEPRALVDALLALQQQHASLDVLQLLPAFQQCLDKRLPDRQALADAIFVFLDYFPLQNASPPFVNFTIHLYAVFRPQKLLVHLQKCAGESSSQPPSALTARRTHNHCHFDVAQALRICTENGSIARVFCVFALPRASLRGSDAFGVASRWPRVCQRVRATFGRRLSRSRRIRPNRAFGVLSWAGG

SEQ ID NO: 162601 - protein, 215 aa, Heterodera glycines
MRCLFALVPLSRAVLLPFFADAVPPPAAVRSARPAARQAVAAQRQPPAGMERQCKCAEIKPCKDRYQKTMEPCLDTCQSHITSLGGNFRQVKACFTPKESLLNSAMRCTERQHDNACSHSSAAQFVPKRYGQTLENEAMVEIDRMIGRMGLDKSGSMKKLVSVSKKLFGCLKQCMAKRAGNCEKQLKCGLLLPSDSAMVQKTKSCALNNGFNTAT

SEQ ID NO: 162602 - protein, 204 aa, Heterodera glycines
MVKHIRGRPLGQVRIGFGDADPLWDSENEKYKVLCRSIHVSKAALYIGYMRLLVSLVSSLFFAYQYMMAVTGQLSSDHWINQVTARFMSQAMMSICLQVIVVVLMVHGVKAEKKSLLLPFIAYAAIAVLAGSIKVMSDLVYLDTSVYKNNEAESRAAKVQFLTNLLRTVLQAWCLSVVWRCYGYLTEKKVARQIREQLNSTATA

SEQ ID NO: 162603 - protein, 193 aa, Heterodera glycines
LLLLAVPLLVVDTKQEVSEAQQLIQICREYLVGLLLETARKELPRDSVEDAKRNLEMAAYFTHCDIQPVHKILTLRTAANLSFKNKQMRHCASFCRRCIELAPKPEIAAQMRKMLAVAERDNTNAFELNYDEHNPFVLCSRSFVPLYRGKPQTKCPFCGASYAPTFAGSVCDVCEVAEIGRETSSNLMISNFK

SEQ ID NO: 162604 - protein, 160 aa, Heterodera glycines
MSVFSSSDGSCKSINSEAVFETAEDLGEALNLDAGVVEWLKEAPRSDEDPILVLDYTDLFHALPGTLNYNKTWVANLLVGQNAEKIRDNVFKFNTWTDLYSAQENLKSDPLLRRLFYFPNPLIAQQLNIPANPVISSIVITFFSDVSGKFQTNPFDFFKF

SEQ ID NO: 162605 - protein, 212 aa, Heterodera glycines
  unsure (1)..(212): unsure at all Xaa locations
DCCPNPYPDICYYFSIKRNPSYYLFTLIMPSALITTITVVGFFTPHSTTGENTEKXMMVSDKLPATSNSVPVLGQYYIGLICIQFTATYVTTWTLGLQXGNSGRTIPRRLRRWLMRVNAHGNFFVRHLLGRELRCTQQSIRNRMNKFDQLVDRADDRPSFVYSPMGSTFDSSAFARMTTASAVSVQQPIQLRQRAEDGKVIMAEKCQKQTNG

SEQ ID NO: 162606 - protein, 323 aa, Heterodera glycines
MSLSVLDQIKQHSTIVADTGDFHAIEVFKPTDATTNPSLILAAAKIEKYKELILKAVKYAKERAAGQSKEAVIELASNKLFVLFGKEILNIVPGRVSTEVDARLSFDKEGSIAKALSLIKLYEEEGIEKERILIKLSSTWEGIEAAKVLESQHGIHCNMTLLFNFYQAVACAQAKVTLISPFVGRILDWFVKNSDKKEFDRITDPGVQSVKRIFNYYKKFGHKTQVMAASFRNTEEIKGLVGCDLMTISPALLGELAKDSEAVGPMMTVENAKKCELEQIEVDEKIFRWQMNEDAMADEKLADGIRRFAVDAIKLEELIRSNL

SEQ ID NO: 162607 - protein, 205 aa, Heterodera glycines
MASPSDLDMKMVPQNGDFKHDVSEEVQQQQQQQHQEQKQPNDLVKNDEDGGGAEAGQDGTAPTETEQKPSPVNNTIPLQKELESDTTYDDTDTFKMFMGKSLSKPVAVILMRMFDELGLNTDEFDERAVEMLATFPFEQANFILKELKDSQLFGVQNKPQYLMSVMRNFRERLRTMGVQQAMELPLIPGPDPESIKTLITKSGYQ

SEQ ID NO: 162608 - protein, 224 aa, Heterodera glycines
MATLLEYPASVVEQISVKLSAPNLNTIAMAYPKVEVPKYSRATLSAGIVHFGVGNFHRSHQAVFLSELFNMGQDLDWAIIGAGVMPTDERIRSCLSGQDFLTTVVGQDEYSNTVQITGAMIDFLPIGNAEAIVAQLSDPAIRIVSMTVTEGGYFINSATGEFDPTHPAIVADSKDPANPRTVFGLIVTALSRRRANGTDPFTVLSCDNITKNGEMARNACVGMA

SEQ ID NO: 162609 - protein, 128 aa, Heterodera glycines
SKSQKSVASTSVLLSIRLTRLTARSAQIRSHNGTLASRLLESLSTLSLLFVVAHSVQFLHAFCFNCRPFFAWFCYCRRRLIPWPPKSSGISAVLIRFRCVSIVILLRINFLRAQIVRYSPLLLMVAKP

SEQ ID NO: 162610 - protein, 248 aa, Heterodera glycines
LAIIAAALMTLAKYVDVYYLITIGRFIIGLNTGFNSGLSPMYLMEISPSNLRGSIGSLHQLFITIAILASQIIGLPQIFGSSNLWPLIFAFTLVPVLFQLCALPFCPESPKYSLIVQGRKDQAEKDLKWLRGGNDVHAELEQINEEAVASRAHPKLSMRAMFCPPLLWPLVLAVFMMLSQQLTGINAAMFYSAGIFKSAGLQGQWPTVATIAMGTVNVLMTFVSVVLVERLGRRTLHITGLVGVLLSS

SEQ ID NO: 162611 - protein, 91 aa, Heterodera glycines
QSVRAESLSKYTVFWIYLSMGTFTLKYFFKKAVLERPWYFFPAFITISWLEYSYYKHGQWKIGMMKGHSKMWRERREEILRWDPNADLWKY

SEQ ID NO: 162612 - protein, 204 aa, Heterodera glycines
MTDIQAYAGPFIVNDVVSYFLKDGVWYYRNAFIPINLECKQPPPAEIVKEWMDKYGSAAPKSTKQAKQKVATPLKKSSHKPKLSSADKDSEMLKRKRKHEQMLSNSSTSSSSTSKPLPVSAQKVVSSSALPTPGAPSPNIPKQKQPAKPSSAPTPKTALSSNAINETPTKVCSTQKTQPQKVSTTVTDEAPPATEVAPAPLVMI

SEQ ID NO: 162613 - protein, 216 aa, Heterodera glycines
SLFTMYSNISSSGWVSSDHPQQQIGNFYSYDADPTLSPNGGGYNAYFDYPNQQPAASSNSNFVPLGSGRPFPHTISQHAQLSFSDNSNANFVPLGSGHFLPERDGDVVCYEDSFEMQKIGRKRRRGRKSGRRARMDIYGAGQPATHDFGEIVNYDDWQQWDNGWGGQQQFEQNEAASNYGQYGIEPSQNYEDYEIYYDNYETDQTKELWQEELEQQ

SEQ ID NO: 162614 - protein, 215 aa, Heterodera glycines
MQSAEETMALVAVTKFRDYLRINTEQPNPDYHKCRDFLFTYATELGFMPWEYECVPGKPMVGMTYAGSDQTLPSLLLYSHTDVVPTFPEHWTYPPYEAFKDIDGNIFGRGAQDMKCVGIQYMEALREILFENGQKPFLRTVHILWGPDEEIGSHDGMEKFVHTDKFRSLNIGFALDERLASETDTYSVFYGERCAWWLQITCPGAPGHGSRFLEN

SEQ ID NO: 162615 - protein, 267 aa, Heterodera glycines
  unsure (1)..(267): unsure at all Xaa locations
MSMSKSSYTYNRKTFEDAEFPILCETCLGPNPYLRMSKDTHGXECKICERPFTTFRWMPGRGARYKKTEICQTCAKLKNVCQTCLLDLEYGLPVQVRDTALQVKETVPKVGANRDYFIQNVDRALEQTDGTVPYGELAKLTDAGTNEMLRKLARNQPYYNRNLPHICSFFVKGECTRGEECPYRHEKPTDPDDPLSLQNMRDRYYGINDPVADKLMNRAKAMPKLTPPEDQSITTLFLGNLGRESRLVVTEADIRDYFYQFGEIRQV

SEQ ID NO: 162616 - protein, 123 aa, Heterodera glycines
MAPPPPPPKSKSSIEEDQTQQHELAASPEWAQNDVEHPVVKVFGFQPNRLGREWPPNPQQPEDTQLGQANKHKTLGDIDWMTSPAEATPVREQIPLRGKLNAQWPPPEKEYRVEVLLPEGVKQ

SEQ ID NO: 162617 - protein, 372 aa, Heterodera glycines
  unsure (1)..(372): unsure at all Xaa locations
LMLLIPRSVRCFYGGLLDVSSLNVGNATRMELLRIAFSTPFAVSHCFLSVSSVRCLQTFEKRQQSQIEREASELSKFIDSLCNPNAFKRRPDALFAPKRIGGMDVAAVSFLDSLNLTEENISKEAISRFSKEVYKMSAIQLSQLLKATSNRKIEHPVLINHICTALKDRPLPPSLRHICQIAFYLSKHSFLDKPLLNRIKEDFLVYVRNEIISKTSFSHIVIAFAFFRLTDRHFWQQIIQIIETLANRPEYSTALIECVNSLAVVNVHPKLVSSVVEKTKSLEKDGLFLGKWLQLVHSLAILNSLDXQMAESVLNRNFFERLSEMQTDKAISEHLAQWNSICYRNIAASARFELPKGEVPPIDGPFLADADP

SEQ ID NO: 162618 - protein, 224 aa, Heterodera glycines
MTSEKEMLWDKACLLTRLVASSVRLSEAAGGIIKDIMKSGDLKIVNKDQTGQMKDLQTEADRSAQICIERSLRAKFGENLTIIGEEDIAPPSTPFQTLQPLPSSHHFHIIFNENATTAVPSSEVLSNDERVPNELRSIEMKDVVVWVDPLDGTSEFTKSKENPALLRQVTVLIGITHKGRPVAGIVHQPYYEGQQTADGLAPNGRTIWSIVGVGTFGHQKTAQQ

SEQ ID NO: 162619 - protein, 217 aa, Heterodera glycines
MTVLQNKQFLLCPSLFFRAVQLRRIRGRPVSRSRISPPPSGEGIQWAPATNAFRVSKDGEPRPLPSAFIDDDDQMDPISKAKENLRGPEKYKVINAVRKKRKHLLQLNFDHIPIIDQVVLMFPSQGAQHLQMGKKVIDNPSSARLFEEANEFLKFDLLSLCLNGPINKLDQTFYAQMALFVSCMAAFEKLKVEQPDLVDRLTDCAGFSIGGICALVA

SEQ ID NO: 162620 - protein, 104 aa, Heterodera glycines
MSSAVSSSPAVLTRLDWLKLYKALQRAGSEFPQYNYRHFARRRIRDYFEQYSKQTMTREKLSEVYQEGQSALGTIQRQSRISSLYPTRPLVIETIDEKKEGAVL

SEQ ID NO: 162621 - protein, 205 aa, Heterodera glycines
PELIVYPSTDFATNTHSIERLDALVFGPGLGRQKHTQNLLADVVNFGTSKQNLCLVIDADGLFFVKECSQLFKGCTDKVIITPNHREFVRLYTQMFPNQQKGEDTDELKIQCEMAEQLAKHLEVTVMRKGEIDIISNGSSQTRIVQAETSMRRCGGQGDILSGATALFAFWARKASDADIYSSEHLLDGAEAASLLVRNASLRTF

SEQ ID NO: 162622 - protein, 216 aa, Heterodera glycines
MSVNVKQKKTAPKRDVSSSPSQSSTSDSSEASNESVDEAKEETTPANDKVLTKYSMAAEIVNTVLKELISEVKEGVEVGHLCSVGDNRLLELTGNLFKKEKSVQKGISMPTCISVDNCVCHFSPLKSEPPVLLKQGQLVKVDLGAHVDGYIATAAHSVVVGASAENKTTGKKANAILAAYNTMEMVLRMLKPTKSFKNAEVTDRIGKFAKTYGTTP

SEQ ID NO: 162623 - protein, 125 aa, Heterodera glycines
  unsure (1)..(125): unsure at all Xaa locations
MCFSREKMAPRMPLTAVGGIPKSNAIGLCLICKELSFGKHYGCISCLGCKTFFRRAVMHNQDTVCKKPGFCEFEVSARRLCRSCRFRTCLDXCGMSXEALQPKRDLIGRQRRRRYQAVASSVTPP

SEQ ID NO: 162624 - protein, 326 aa, Heterodera glycines
MKPLKIDVDFPSNSHPTSQELNQDCIPLYEMLEFEELQFPNYYLSEQLGRGAHATVMPCHFHGKPAAAKLFNANVDFKTIQKEAKLLHEFRHENIIELYALFHGTMSGLVLELMEGGSLSELIHQRKSIVYQNCHVINWTFQVAKALEYLHKLSFIHRDVKPSNMLLSLDYVVLKLCDFGTIAKHRTDMTSTCGTAAWMAPEVFRGESYDFRCDVFSLGICLWEMLARSPPFADAPELNSLAVLWEVAESGLRPPPIEGVAEPLQQLMVRCWADEPNDRPPIDEVKEMLEALLKQLPHGALSPFVGRLLTGRPSPVDFSPQARTND

SEQ ID NO: 162625 - protein, 207 aa, Heterodera glycines
DNAIFKKNCLSVTKASDLPKGPKTASGAQTDEAEKSCKMLVTPLFDIPYEEQLKIKFDHSKKVLELLQKKLTQAHATNSLIAKESLPKNVLPSPLIEQYRNKCEFSVGYSSGDNRSAVVGFMSGKMANRQSNVLAPDECSNLTRNTRSIVRHFEAFVRKFGEEPFDEFERKGFWKMLTVKDFSGDTMIIVTVHPHPNSEITDNAKTK

SEQ ID NO: 162626 - protein, 120 aa, Heterodera glycines
TIGPTNSPLPQNYLSKSNHFLVNVQMLLLVLLLILLFPSESLQAASFITLHCQGNGLYVSGRWNENGQTADLPLPSELTMQRLARLIKCLFICYIFFEGSCREKTKMAPFLSSAIPIECF

SEQ ID NO: 162627 - protein, 135 aa, Heterodera glycines
AVHQISLCQMAGLPKLPTRARLKLPSHCGQHQQQMTIEFVPDGFNHTELEADNTWYLTLQFNRTGTKEQGTFLLANYTLDVRFFNVQNASSHYNGTYLYAKAPSFKPEWSATVQNGQPNILTCSKNGLHLDEKSS

SEQ ID NO: 162628 - protein, 198 aa, Heterodera glycines
MTGESAYELVLLVKPEVFIYKIPPLTGNKGYKAADWKLDSPDWVGRLRLISIGDKLEIRLEDKTSGELFAKAPIGQLNSVDYESVSDSSRYFVVRLRNDNAQTAFVGIGFADRADSFDLNVAIQDHFKAVKKCDDSAEDNAETVPKLDLSFKEGQTITVNIGKKTITSNNNSSSAVPNLRTSLGGSSAVPLLPPPPAS

SEQ ID NO: 162629 - protein, 296 aa, Heterodera glycines
  unsure (1)..(296): unsure at all Xaa locations
SEVQLVLQHLPQEYQRFEEKLERARAEMAQLQQNPQQPPYLPPDAMPPPQQIMPMPIRQDFYVRALFDNDPSRGDAVLPHRSLAFRYGDILHVTSVGDDDWWTARRVAENGDKGPEGIIPSKKREEKRERQRRKQVNFNAGSQSLGRNASMSAGGFGGGGGLDGRRGSRSQLSFSRKFPFXKSTEKLNEYPSDGGETGGGTIADEPIHSYVTVELRTVNYVRPVVVLGALKDRINDELVSRHPDRFSSCVPHTSRPPREGEVHGRNYYFVTKAEMERDGKSNLFIXAGQLQNNLYG

SEQ ID NO: 162630 - protein, 229 aa, Heterodera glycines
DICNAYDVLFLVDTVASICGAPFHADALKVDCVYAATQKVLNCPPGLAPISFSEKALEKITKRKTRVPSFYFDALELGNYWGCFDEPRRYHHTAPISLVYALREGLSAVAQEGIGHMVNRHKINAKLLYDAFDQLGLELFVQKENNRLPCLTTVRVPEGVDWKAVQDKLMAQGFEIAGGLGPTAGKIWRIGTFGINSNPEDIESLKQALKGALYEQEEKGQSDHFKAAI

SEQ ID NO: 162631 - protein, 173 aa, Heterodera glycines
  unsure (1)..(173): unsure at all Xaa locations
MMEMTILGNRISITADGAKVSPFGSKMDMGDYYVENNKLRKTRGLGWVMAALFVVADMAGGGIVALPTAVVRCQFFSGYXLGQCWEILLRRFPVYRTHCRKPYAEIGLKALGPKIRTIVSICVNVTQYGATTVFLLLCAKNIRDFIRAFLDKEISFCYLIVVIALVLLPVTLL

SEQ ID NO: 162632 - protein, 140 aa, Heterodera glycines
MIGSTARCVALLLLGATMAQAFLTTFNVAPNAFQNRRGCRGGGGGGCGGGCGAPPPSGGGAIKLTLGCEGPPPQAPAPCGCGGGCGGGCGGGYGGGCGAPPPSGGGAIKLTLGCEGPPPQAPAPCGCGSGCGCGCGGGCG

SEQ ID NO: 162633 - protein, 97 aa, Heterodera glycines; identical to SEQ ID NO: 146617

SEQ ID NO: 162634 - protein, 216 aa, Heterodera glycines
ETSSNSATSCFKPNRNQSADISNLPNYLQQLQLGPGGSSTTRRTGRFVEERRLRHVKQQPSYSFEVSGTWGQRFSSCQFLDVSEDGRTLIGCWTSEQNNLFEGHCSRVLSFGVTVDPNTAKKDTQRMALAEDVGDMASLLDSNGKYRCNTYGLCFEPIDNEICLGSSNRILIDMVLAPADRDVTCLLFATARSFYQEQQHSVGSCPKIVTKCTVNL

SEQ ID NO: 162635 - protein, 144 aa, Heterodera glycines
FWSLSLQFFLSAAAAAFAACKSAVDFDRIPLFLLALSQTPCPSVAQFPFALVKGCGGLSAVVQFRLSPCVCVVFSFGFVPFPFPVLFQKVAATLRFGHSADSADSPVKNGKKWRHFACRRTFGRLLPPSVRLRLFASLCRQRRL

SEQ ID NO: 162636 - protein, 104 aa, Heterodera glycines
ARGNKANNNIFLNSLQFKRYLCLTQVLVLRDISIQVRKRFPNMESLVDSELIQVSRTTNIDQNGIIRFECKLIKLPELDLMENVKSEFPKYWMPINWSVNHYLC

SEQ ID NO: 162637 - protein, 149 aa, Heterodera glycines
MNFACCCHFSTVAQRYFSSSRKQTEQYLERQANDQYSRRAREHSYRARSAFKLMQINDKMHFIRPGLVAIDAGAAPGSWCQVLSELIFPNNFAPKKRTKADERTDECPFDGTEQRQGYILGVDLLVRPLLFLLSHFLRFISPLSDNKSN

SEQ ID NO: 162638 - protein, 227 aa, Heterodera glycines
LIILQMKLFCPFVFLVLLSATAFAFSNLNKTPKTVHWEDACDECQLIIKRVVNVATDPEKVAELKILLSALCQETSYVEECRLFVSKLDLFLGRLLPFLRDAHHVCKELRICNNGRLQQFHVLGLHFARVNASFQRKDLICEECQLAARELAREVSEPKFQQYVEEWLQGNVCVHLGTLKSSCEQMLDEFLPEMWREMEDILSDQKKFCQDLELCPAGISSPSSARR

SEQ ID NO: 162639 - protein, 259 aa, Heterodera glycines
MGSDPPAAVASFPSAGSATFASLHNARHNCISTCHYPCHSAAASLRSTHDQMRACISIDLLVACQREVNFLRMIDRKAPVLYEKVVVENAIRRYEMCWLPAQAAKPNLHNIPPLDVHWIWHTHMLSPTHYREDCLAICGTVVDHKLLNADEIQQRYEQSVSSWSEFCPEEPYDFLQSNDRVREQYQQKSKYDLAEAVQRQRNFNYQVSLPHFTAPRFLTDAIDRYIKFLQLKQTYADHFLTPCYDFDLVWHTHQVHPLD

SEQ ID NO: 162640 - protein, 205 aa, Heterodera glycines
MANPNSDHSLPLSPSPSPSHSSHSFSLRSVFAHHFCFFCSNSVLIALVVFTLSLLMAFLLGKRRSSQNELAKRRRDKSPEGIELEENPEVFKSSLLKDSKEHIISTYFPDVRTLFDAFQRGLKVAEHSACLGFRPAKGSPYQFLTYAEVAVRSQSFGHALISKLGLQPGNETFVAIYAQNCPEWMITAIGCTRHSMVIVPLYDTL

SEQ ID NO: 162641 - protein, 307 aa, Heterodera glycines
MSVSWGTQYSKLKTNLRLAANRLRLLQKKKTEQAVKARCEIADFLSTDKEDRARIRVETIIREDFVVEAYELLEMYCELLLARFGIIQQMKELDDGIAEAVSSLLWVAPRIGHEIAEFKVINDELTHKYGKQFAEAARMNQLPEPSRVSPKLVQKLSVSAPSKLLVEKYLVTIAQSAGVDFAPDAKVMREDDDEIARAERNLINFMNEEQYGWTVRHNDDPNSKGSGGGHFAAAVAGAVGPADPLMNQGSNNNNGGGATAMPMPPNGSGAFAMSPSTFVPSHPSPLATSSSPPPEYAPPPPLPAHGA

SEQ ID NO: 162642 - protein, 58 aa, Heterodera glycines
IINIFSETALKRTKFYLQVILGTQMLTLSKREMNKNLKIFNCFLNMRKILGLTFFFIN

SEQ ID NO: 162643 - protein, 141 aa, Heterodera glycines
TSQKMFFHSPLPRTPVLRRSTLSGSGQVEIGAALRHQLAEVFTPPSNIYQVAPQREQSVDDSGGPSAAETVPLIEHQLLMADQDQLNNNIVQQQNLYQQHQHNFVAPSILVSSSSMEKSASAQDLAGTAAALIRRHRSASK

SEQ ID NO: 162644 - protein, 428 aa, Heterodera glycines
MAIEAEEFGEQQETDEVEQQENGSGNSEEEEEEEEAPQIRRQQGQIRMMTSSGEETVQATEAAVPPPAAQQAPPQSPAATAAAPQSPAPTQTAAPASPGSAAAIPQSPAAAGAAAAAQQAALEEAKRRQQEAMEKARAEALRLQEEARARAEAARQQHQQAAEQARLQAEQQLKAQQEAAKRQAEERAQQLKAQQQQQQQQSVQVQQQKQQQPPISPSATAQQQKAAPAPAAQPPAKAPQQPQAPKAAVAPAQQQQQPKAAAPPPPKAAAAPQQPKATAVAAPPKPTAPPAVAPQKRAPSPVVREVQLPEAPTQPILRHAEYTPKLVDASVNKLPPGQEPDEEQLEASAVPRNPIIEDNAWQVQRRVQPEYQPVQPAKLNATGDFLVESEAKKSIVPEAVGYSKTKWNEFPEEEEKERQSVPKVKRRN

SEQ ID NO: 162645 - protein, 224 aa, Heterodera glycines
MEDLYEKCLKNSRPTHRKMEENLYDIRVLDVKAKLAENELRQKMTQMANTWKKTGKDERKRKYEEIEEQFAKANDLCNEKIQLAESTYEMVDSFIQKLDKETSSFNAFVKRSKRTAQSTPGTSKENIADEPSVVRRRGTAPSTSMATKRGGTTGRTSAREGTSSATKAESVRVDGAASSSGSGTQLVGKGDMPIDPNEPRYCTCQQVSFGHMVGCDNKECPLEW

SEQ ID NO: 162646 - protein, 72 aa, Heterodera glycines
IAFNFLKDDDQWPDGWTAVTKDGRASAQFEHTLLVTETGCDVLTERSVAGAPRPWFRDQLEQLGYNRKKRQQ

SEQ ID NO: 162647 - protein, 148 aa, Heterodera glycines
FFFFFFFFFFFFSLCLFISGIFALWQSKGRGIGFEFVTDHTYSWHFVFVSVRPSVGRFGSFSVRLSILSNVHIRNVYWHPALLLRTPTPLLLLPFDALHATVVGRVRIKRVVGISRDGSDQRHQKDHKQSQRGKFHNELMSGDLVGFD

SEQ ID NO: 162648 - protein, 287 aa, Heterodera glycines
  unsure (1)..(287): unsure at all Xaa locations
MAPKCLPLELLFEIVPFIPAEKAVPNALSSCRLLHKLLLPRVIKWKEQLLTDLMSFSAIVNNLSAKVDNLSGVVNNHSVKLDNLSGVVNNLSGVVNNLSAKVETIEKKMGETTGKAPNEQKERGNGHKAVMGAYNENNGTIEVPLHGYNVGKAIVERILNTENGTVHLHGMREPMSLAKAVEIGFFDNLSLTVVDPXPRQRLFLDEALERKVLDSNGRLQHQHRQLTLGEANRQRLVRLEKGKPTSKKKIIKLESDSSKMSIHLDKTSNSISKTTVEPDKTSNNTSN

SEQ ID NO: 162649 - protein, 296 aa, Heterodera glycines
  unsure (1)..(296): unsure at all Xaa locations
MYRPSQTPRLTLSSARVAXHRVARLNTKMDTLSGALPFYRLSKESMKVVVFHWRLAAPTYATPLMILHKVRLESSSTGSSFPAKFAKPVPLAVVSLDSRXTVGISLIHSCASVXPTRHLGTLRESXTPAVYPRLSKFPWLNIQSTGQKSDTVNVHKDHPSPLFXLDSRIPRVRASSKLVVQRQPNAPQAALTTSPRTIPERTAHSHGQKPPVSRNSPADPTXSQFFSRSYESNLPTSLTYIILSTRGCSPWRPAADIGTIRQEIQIASLAFSRAVWSARDTTGTAVLYGRNIPISG

SEQ ID NO: 162650 - protein, 189 aa, Heterodera glycines
MSSTIAPVSSADGTAGSAAAVASAGPSSVEPMPPVEQLMEGIEEKCPPSLDQRLNAMDEVDMRIDDLLTVVAEVMAGLDKDKPLSKAKMEELYKKYELKLDEIQRGIAEQLTYMEQVCVGAEHQGSTYHYHQVAQLSAARLHSLHAHLAMLRNNMDNGSRESGVDGQQQPTGAADEQRKNSEKKGKEER

SEQ ID NO: 162651 - protein, 214 aa, Heterodera glycines
MDPYLQELINKWLCWDKNETTRTEIERLVKENNVHELRLRMVGKLSFGTAGVRTHMEAGFARLNELTIIQLSHGMARHLTSEMGEDGKKKGVVIGFDGRHQSKRFAELAANVFVLNGLSAFLFSAVVPTPVGSFAVLSLGCAAGIMITASHNPKEDNGFKAYWANGAQILSPHDTEICPIVAEESKPEETYWDTVQLGTSACLHSADSVLEKYF

SEQ ID NO: 162652 - protein, 140 aa, Heterodera glycines
MTTEQGKNEQQQGKGIYESTKESLSNVAEGTKEWLTSAKDKVADSLTSTKDTVTGKSAEMRDRASDSYEDAKQGAQDRYERAKEYGSEKTEQLKDYATDKKEEAGEKMEQNREKAAEKWDETKEAGGERMQRAGDKIRGK

SEQ ID NO: 162653 - protein, 387 aa, Heterodera glycines
MALVSKWRSDPFGRSDWPSLWRDRFSRDWDDWPRDWPRPGELMERFRSRDFDRDRWWRDWPTDWPRMDAIVPRFSSHLDRFDRNWRDDPFWRDLYPRWAEPIFKDGIDVKTNITNDSNRFAVEMDTYQFRPEELQVKTMDDTLLIEGRHEDVRDRDNYTKMYFVRKYQLPADVESHSISSHIDSSGRLSVEAQKRWQAVEGERSIPIESGSRRQGGGYGSRSSSYSPRDRYYADSGRGSANDYYRAESRLNGAANGGGGYLSPNPRSDGYRTEFEKRETDANGMRHEARREEFREEFRRSGSAANVLPPASPMLRTESRLSGAVGANASSGEERRESSHFRRTASAASREYRSGGAFAGGENLLRTAEELGGRSSAFGTRNVPIHRG

SEQ ID NO: 162654 - protein, 350 aa, Heterodera glycines
MRNSGTKRRRAVQQQRHHHLVKRWNFAINARTDTLETCPDAFQRRATDGNDSAQFASHQRHPPTRKKVYLKSSRLPFLNHRQQLATDAPPLQNGLSSIAAAVPSSIESVANERDFMCEWLMQSEGDDDWSDEEGTAAGPIEPCARFFASASQMVFHVYNEHLVPLVQQHSDGEPPRIRCRWPICENTPRTLCNPSVLPYKEYVYHIRQQFERSRERTSAQNAYSDFAAQEAIRRHAFANLRKEITEDSEGPVTRSIRLTSALILRNICHHSVAGRRKLRTHESFISWLSLSHMESARTLAQCLSEMARHANNETEPQRNVIKRKTSCSSGDLQQNQPSFASEQMDDNDTA

SEQ ID NO: 162655 - protein, 219 aa, Heterodera glycines
MNSSEETTENVGMGGNKDERQTTSKDETDESSSENQRNEQRQRQMDSEKEDSRFECNICLDMAKDAVVSMCGHLFCWPCLFQWMDTRPYRQLCPVCKSAISKDKVIPLYGRGGGDSDPREKIPPRPQGQRTEETNQGFPGMFHWGGDNGGHGGGGVQFSLGIGVFPISFFASFFNTNFGGADRRPDPPPVGSRQMLEEQLLSNTFLYIGVLILLWLVFV

SEQ ID NO: 162656 - protein, 217 aa, Heterodera glycines
NANVRPQLQGVDNAKDCLTPSTTGNNQPTREQPKLMDIDERIGMDDEDNDDGDRFGEAAEVLGGGDNANRVGGERVVGNRLRKRRSVSCEPTANSPAKMAPHQPADDQSAGCLLQRTQSVNAFAVPSAHQQNAVVPIASSSRISSRMPSSVSICSYANSEVSARKRSPSGDGSLCSKEERSLSLTTPKISISICGKALYACASGRLDDLAALLKGHP

SEQ ID NO: 162657 - protein, 195 aa, Heterodera glycines
MLIAYIPKRIHLNLNVVGAALRQRMPFSAAVLDPHDQLKDSDKPMSEQMNPSFFKMVDYYFDKGAAVIEPKLVENFKASHGKSKEERVSSVKGILAAIKPVNKVLYVTFPLRRDDGSYEMIEAWRAMHSEHRTPTKGGIRFSMDVNEDEVKALSALMTAKCAVVDVPFGGAKGGVKIDPKKYSAYEIEKITRRFT

SEQ ID NO: 162658 - protein, 215 aa, Heterodera glycines
  unsure (1)..(215): unsure at all Xaa locations
MAIFIINDIRIHQFFRPFELVLSTWQQPTAVAVVPGDNHDGNGLLHAASLGIWGVHDRQLNWRXLHDVLKFGSRKHAIYRRWRWHESKNNFASGLVLSEEEWRREWTKVYESLECVHVFALAHILHRPIIVCWWTPFCAMRRPKNGHRFRLAATPAQTVPSLGEFSTEHWCAGQRPLWSTFDGRCAKVVHFCRQTVVAAQNCLRLPFRKADECRG

SEQ ID NO: 162659 - protein, 75 aa, Heterodera glycines
NLGIRNIALFEFLTLKSTRFSKISVGADPSPHTKFTAVNREKKVSTTLKNFLDFFSHKLKRVIIFNSINAFIKKC

SEQ ID NO: 162660 - protein, 279 aa, Heterodera glycines
MVASSFSNNGKNILESPFKLTGECKLLYYCTNELGHFLNQTSNALIGNPLRIVPFDGLSSPQKQVCTNTSNSLEFNCTERYISLTNGTALWIYDLQKGSTLRELHDHDGNISGVAWHRQSPWLLASVGDDCTLRLWDLPSHPAQIAIRRATKPYRRLEFSPDCNYIACAGELVSIYDLCMAQNVVHMLSCSSVFDINPVRFNPSECLLATADDDRTVRFWDVDTGECVTQTPIFNAKIGQIHFEPNGKYLIAVTEKQMASIRWEPFELVSQFDLSHQLH

SEQ ID NO: 162661 - protein, 93 aa, Heterodera glycines
FDDKTNEICMVLPGHRCPMNCLRRLKLKVTPKRPKMNFETDDRTFFLQEATQKWNFDDLHVMVMTSHFLRNHSVHFSQMMAPNLRMTAAAKKI

SEQ ID NO: 162662 - protein, 205 aa, Heterodera glycines
  unsure (1)..(205): unsure at all Xaa locations
MDAPADAPGVHLFGTVVPKEVFLAQLFYLLYFASFGSLFPLLAVYFKQLGLSAAQAGILLGSRPLVEFVASPFWGSFADRFRKGKLLLLCSLCSMVVFTLAVGFVQPLTPYCVVLDQNSTGGECKFLVPASEIVRGGALGYIKKVAGIGRRRRGKTKKKNSTXRIVRLDILSIIDLSTFDSKNYLVAGKAPEYITKEKVCNYEKE

SEQ ID NO: 162663 - protein, 77 aa, Heterodera glycines
INFFPSSPKRSIGKVRLCSNSLNKNASSYIFRFSANRAGASALHFLKKMTKKSYFSKLKSLLNREETEDRLDFCSNK

SEQ ID NO: 162664 - protein, 99 aa, Heterodera glycines
  unsure (1)..(99): unsure at all Xaa locations
MAETAQRTTPRLTKDRRRNSGRRRRSASSSSSTANXRRSPPKRGKRPSGRASFRASTSISGRTRRSPPRNDEARKRSIAAHFYSSADDVHFLELLPFNE

SEQ ID NO: 162665 - protein, 246 aa, Heterodera glycines
RLSPLLFLSVLTFSVRSLRILQIVPGFTNSHVLFNYRLAQTLADMGHSVTLWTQMEMAMVFAGDLKLPEGVIEHRVPIHFRDRLKVEGLKVFQEMIFARGTPYELWWTGREFQEMRLEACEQMLNEADALRQKWAKFDLAIGHFHDLCPVILGKKFRLRESLMGWVTHGTSLYDFTAVTLGIRTLPSFVPHPLSSNGDRMSFTGRLKNVLWHLSGIEFVNLPEALLHDENKMYEQMSHGRDNLWAL

SEQ ID NO: 162666 - protein, 46 aa, Heterodera glycines
CQKLIENINLYSGYSSVKNDATLAIRPRKKSSFEWYLQIKKRLSGS

SEQ ID NO: 162667 - protein, 174 aa, Heterodera glycines
MADHQHNDIELAEDASATEQGTKQNVSVAVKWFFHGNWRRFQCSEWTYSALQAEIRTIEPNFSGQFFYRDADGDAIVFTTDAEMRVMLDHFQKKMNKDTVTLETMGGEGTVKTGVVKTGCPYINKIGKMRDVTNGNGDKSLHPHIMCDLCDGGVVGIRYKCMVCPDFDLCEQCE

SEQ ID NO: 162668 - protein, 245 aa, Heterodera glycines
LQLSSLRLPSVQWLCMPTTISVSPAIPDKLVVNGVDLVNRDQLSVSQNRELQRYIDANAHLLGFLDKDKEQQQTDGGGDKRTPLTISVTEQKFGPISPGQTSGISDKLPPSSAASSFSSPAYGRPPSAFAAASLNRAGSPYSMGGGSEYGGRRKGVSWSDVVEEPKPTTRTRSDSPPPASFIRHSMPALGKDSPSGYGTDEGRHYRNGASDDGTLDGGHDGRQNYDRYRHSSQNPFDRADGWVSS

SEQ ID NO: 162669 - protein, 205 aa, Heterodera glycines
MSSNLMGSPSCFFHPTAEQAAAAEEVDKYEVFSWHGDLSDQLAAQFLVTDQQLLKECREKLANSELRETKLLSKNGELNAENKALKAELEKQKMMTEHSQIKAKVEKMEQENQQQLDKKYVSFDVFNALVERIKRLENQQLKQNKEEGKKVTSSGDQSPPAVVSAKVAKELPNSKKQNGWDAKVCHKDIEIIGEKQLTINCKGNR

SEQ ID NO: 162670 - protein, 160 aa, Heterodera glycines
MSLVELSKSRWFNGYQKIFEHNSAQLKCRMRFGVYLPDNQPESKLPVLFYLSGLKCTEENFVVKSAMQRFASNRKIIVVNPDTSPRGVVTGDGDDPSFGAAAGFYLDATETKWAQNYRMYSYILDELVPLVFSTFSVEKNKCGIFGHSMGGHGALTIALK

SEQ ID NO: 162671 - protein, 223 aa, Heterodera glycines
  unsure (1)..(223): unsure at all Xaa locations
MAGNFWKSSHFEQWILDKGDLLRERGEDLKVYSEEEYQKLMIFFTNFIQEMGQCKERELGTQCNENTRDRPIQRMQAIATACVYFRRFYAXVRRSFKDIDPFLLSMTCTNLASKVEEMGHLTHTKLTATFQRAMKKWALFDPQQMALYHQIKHHHISETEFCLVELLDCSLIVYHPYRPLLQFRNDMKNASVQNAEHLYQDAWRVCNDSLKSDVPLLYPPHMV

SEQ ID NO: 162672 - protein, 158 aa, Heterodera glycines
AVQVNTQKVEVVFIETIDGRANGLKDSFALRLELKCLLEPFVDKSLQRVHLAFEFVQLIFGHNSVVHSFDLSRRCSHPIAQCFVFSRQPRLAPHNFLPFRFQSVFFRIKHFQQCDRLGREKRLVERRQPQKIQTDWSLLLGGFPSQKQYYGPLSLLIF

SEQ ID NO: 162673 - protein, 212 aa, Heterodera glycines
TFDHFYQFYVFSVNRDSISSLDIYQRILRHRNYFVALVHKSLLPPQIRLPFVGSVHYLSSGLRFNIEWLLFWGPWSPWKSSYALKDEFKERDNLERIARNMQMNLLVMSVVNLVFLPFVVVYQVLFSFFSYSEHFQRDRHILGMRKYSNYGREKLRHFNEMDSELDARLNRSYEFAVRYTDQFVSTQSKIIAKNIAFIAAAVFVVLCSLTAY

SEQ ID NO: 162674 - protein, 182 aa, Heterodera glycines
INDRPYHCRYCPKRFTQKSHLDQHERIHTGLKPFTCQYCGRQFRQRSQQLGHEATHMNRERHSMGSMAMSAAVLGGLVGAAGGYGDAALCGTARERTTHLALKQPQQQQQEMAQAAAAQLTADEQRRQQQQQQSSSPTRPLGLGRPTVAGGVGGNGTRHFQRSQQQQMHQQQTNMDQCCAGG

SEQ ID NO: 162675 - protein, 203 aa, Heterodera glycines
MLFSPSTVLLLLLIVLPFSLSFILIPQNVRQISPALSSRPFRRFGHFSVIAKRNPIVLIPGDGGSRLKANLTGKPSLVHYFCQRQTNDFFALWLDLQQFGPFVIDCWADNMRLNFNRTSGRAQDLEGVKVRVPGFGHTRTVEWIDSSKRSPSRYFAPIVASLAKLGYQRGIDVIGAPYDWRRAPEELLHYFVKLRSLIEQLYH

SEQ ID NO: 162676 - protein, 185 aa, Heterodera glycines
MSNIAFIRIQKECKEIILCKELQENGVTIEPVNETLFEIIGKIRGPPDSPYENGIFILDVKIPQEYPFQPPKTGAICLDILKDQWAASMTLRTVLLSVQSLLLSPEPKDPQDAIVAKQCLSDPALFRSTAKYWAQHYANAPGEIDRNKAKCVSTLQEMGASKDASISALSCYNWNLAKATEFLFT

SEQ ID NO: 162677 - protein, 177 aa, Heterodera glycines
MTSQNEGAVPAEETKKLVKEKDEATDGFYFQQTMYRIRDPRVSIPFYCNVLGMRLLKQLDFPEGKFSLFFMGYKDLDEIPSDDAAQKKFALSTHSTIELTHNWEHGTDFKGYHNGNSEPRGFGHIGIAVPDVDSACARFEQLGVKFVKKPNEGRMRGLAFITDPDGYWIEIFNPNNM

SEQ ID NO: 162678 - protein, 170 aa, Heterodera glycines
MHQMHQSCYAGVAGPNGGPLRPSVSLSVVHESSALGSDGESIEVSPCTSDQSAGGGDGNLGEGRQTTKTEYIPKVKLRQKPNRRWSEQDIQKRLSLPPDIRLPQNVIDKLNRTPTLDNPLTRKSKRASLNEIGFGKLETYKKIFDLGEGTYATVYLGKSLLTGKNVALKE

SEQ ID NO: 162679 - protein, 199 aa, Heterodera glycines
MDIRRHFMCQKLFCLPLLMIITSFCTRSSNAELSQNNKKLSWIIGKWRSEFSGKVFWPSIPTMTFGEELIVAEAPLARTSGVQFLNWSARAWSHSTKDHFHDEWGYITVENNGNATLMTAGNNGFTTYEVGEVKSNKMVLTLKDIGRISFSRDLPVEDLRRTFIKHDDTYMEQVLEMRTATHPRVGYMEHTRVIYTKIT

SEQ ID NO: 162680 - protein, 108 aa, Heterodera glycines
MTAFKEFVNGLIKTKPVVIFSKEHCPFCVKAKDAINSFKLKPGALEIVELNQRNDCDQIQDFLKELTGARSVPRVFIGGTFFGGGDDTVVGLKNGMLEKQLKAADALQ

SEQ ID NO: 162681 - protein, 240 aa, Heterodera glycines
EQSNSTASPHIKITVNETGKQKRDNEQHNMEAVDDEFVNRLLKLSSRLDNLINVFGKKSSIKLKEDENNNKKFHSNSPNVVHALIGPTSCAVFPIHDYGEAFRKKYFGEILQCNLRSSDRILFDILKKIGDGRKVSFTCDSSRVAENSRVIVRLNLESNEISILQKDQSKIEGEIPVWKFIGSLVGTYCADDQSVNELTDQWLALASSVRIDELSRQMSVHLGAHDFLSSQHAICLPDLV

SEQ ID NO: 162682 - protein, 218 aa, Heterodera glycines
KILHIGNLICKLLTDVLPPTSLKNNNGPRRRRRQAGKADGTLRRCTRREYRMLSDDQRTRFHNALLQLKRGYGSYEYDRITALHSNINMMPSAHSGPTFPLWHREYNKRLEIALRSIDSSVCVPYWDSTLDQRLPNPSHSIMWTELFMGSTDSNNFVNSGFLANWITSDGNRVSRTMGADGGQLINETEANNVMSIQEINHIFAFAGGRPSQNCATNP

SEQ ID NO: 162683 - protein, 165 aa, Heterodera glycines
NEQIDIKPKIEVRKSHEEKKKKRRHYSSEEEEEGTEEEEKKPEPIDQEQLLVNMREEHNLKFKTGILIGLRADEHIKKMSAMVGGGEEKTFEAFLKGLDEKKRRKLMKKIMKTEVSDDSDIEKDKKQRRKQKKEEKRKADKKHKHRRSSSRETSRKRKEGKHHRH

SEQ ID NO: 162684 - protein, 231 aa, Heterodera glycines
KGLHISLSPLSSLLLSQHNSNSSTASSLIDEMTSSRSRTRRATSNTASTTATAGRRRSRSRRRTRAEQVREATRRALRQNNGGNATRTRKKRGAAMRRPPKLKPLRGRPRGSRKSRAAPRTAGQKRGRGRPRTVKKGRARRGRSAAQRQTTTTADAATNTDAHWVTIAELRAATNTEATAAATAPTTTADGAAATNNDPTGAATTPTTNAATNTEAPAATTPATTADVALD

SEQ ID NO: 162685 - protein, 354 aa, Heterodera glycines
  unsure (1)..(354): unsure at all Xaa locations
TAANKEEEEQLHELSSICKQVISIFNEQNGSKIGKASGAILRQANSNKYVLEATPGPSSSSAISSALFETKYCTAMFLQKFSVLSFEKIFTKDAYYYRIKLSQEQTSGTANMTLRRIAREIQSLQSNLMLTASTSAFVRSCEEHLDAMKVLITGPEGTPYQNGCFEFDFFFPSTFPQTPPQVHLRTTGNNTVRFNPNLYNEGKVCLSILGTWHGRPEEQWNAERSSVLQVIISIQSLIFVNDPYYNEPGYERYHSTQQGDLSSRRYNATIQVATVRWAXLEQLKRPPTEFESAVQLHFWLKRDEITAQIKRWADEWRSQAKQDKRFASSANELEKLLKQVSEELEKLKKLNLPE

SEQ ID NO: 162686 - protein, 629 aa, Heterodera glycines
MLAATGRWPSSSSNSGLRIAMAICAILACCSLPNSTEAALAEVGQQPKGNNPLLYSVDDPIVHLDADTFEDTVLRPNRDRAYIVEFYKDWCGYCRRFAPYFKVLSESIKSWPFVQVAAINCADAYNVKICKANDIPTVPKLKYFPRNARSFEEGQVIEHSYESAMEMREQVHKKIMEEFNAETGKGNADFYLQKMEAQRQHNNENSQPEPWRDMPNSTQFLAQLFEKDAKDGLPFSLDLLLYKPSVEVRQVLVGSADEVPRNVPKPAKGKATEAAAFKLPYVRAMERGKTEPILAESLNDQTLAKLRELVKPMMVELNKTEQAKAHHKEPVQVVDCAQSPEKCKQMFFVSETDMLKAIHTALLDEVISSGGDEINGDRFAALRKFVELLIQRFPKKTFERNPQLSAHPKGTALSSIGKPLLRSQRAFKVFEQMKRFLDAKAGDGKVSMDEWRAEFDQAKKQNGDPFPVTAEWEHCKGTRTIFRGFTCGLWTAFHAMTVQAYLGQEQQPLKPLKAIQGWVANFFSCSGCRRHFMAMTTEKFPMEAKNVNKPEDVVLYLWKAHNIVNKRLHGDEATEDPQFIKEQFPPQYLCPGCHKTPSSASDGNDPTELDPEKTLRFLLQYSTNIKPRP

SEQ ID NO: 162687 - protein, 222 aa, Heterodera glycines
QSLQTSILLEQQQKAFLSNSGTTHNNLGTLLNRLPSLNGGSPVETALHRNGAVVAEQPVLGNNRQQQQQLTGIERLLNVAALIPQLHPFQQLQRTQQTTTATKHEGNGGGGGANVRKVMEENSVLFWSQMRSMGLLDDLLNTLSTTLERLKHIYLNGGNAVSEEFAARRLSGVALALDLCTLFSDKIHNRCIQATLETNLITKELLELHRQTRRSTSGKVEK

SEQ ID NO: 162688 - protein, 276 aa, Heterodera glycines
MQQLSDRRIQFLLYIDKKFVKSHAILKLNEKKYGLLTQHVTFEVASKARAMTLSNVLNKMNMKLFGFNYMPMFPQASKSKFNMDGGDVLVIGVDTSRPPKATPFEKFMLRKKGVEGLISEDPLIVGICANYLKNPYKFCGDYYFQPCTQDVLEPNMLSYKMSWILDKVKKNRSKPPSTIFIIRDGVSEGMVPNNIHDEFPSYVRACKKYDPTWEPKFVYCIVDKNHNKRFFVKGQQQVENTAPGAVIDSKVVRVDIHEFWMQSHVPLKGTSKMPQY

SEQ ID NO: 162689 - protein, 158 aa, Heterodera glycines
SSTSLCLLLFAVFYLIDARTQSVAVKGRLLCGTAPARNVRVKLYDEDAGVDPDDQLDAGYSDPNGNFQLSGHTSELTNIDVVFKVYHDCDDGIKPGSRKLKFKIPNSYVTDSATPKKTFDIGVLNLETVFKDEERELIVTMKKKRRSHRYQDFLDILP

SEQ ID NO: 162690 - protein, 156 aa, Heterodera glycines
EKTQEALSKGDFRTAIQLQPMLKFNGGGHINHSIFWTVLAKDGGEPSGDLLKTIERDFASVQKMQEKVSTKAVGVQGSGWSWLGYNKELKRLQVAACMNQDPLEETTGLIPLFGIDVWEHAYYLQYKNVRPDYIKAVWTVVNWKNVEERFMNALNE

SEQ ID NO: 162691 - protein, 242 aa, Heterodera glycines
MSAFFVVALPVMLAVLTEAQNFGGQGGALNAPLPFGGPINPGFVQEQLPHMLHHPNLKSGEDIEAAFQNGGGQVAGVQHQQSNNNLPPPPPQNFGNNNFNQQKRPKFNNGQFSGVRRAQPHLTQQQQRLNQAETPCPQATWQKIMEDNIKANDSTSTLNAIQSGFGKAFKNQIFMVLCTTTEEKKRFGQKVQLDIKGDGYCNVEREGRLVPSGQAECRKWHHIERIGRIWPRHFIGWTQMIV

SEQ ID NO: 162692 - protein, 177 aa, Heterodera glycines
  unsure (1)..(177): unsure at all Xaa locations
QVTRGQVCNGGAQSQQNQFRITEKPPAHQAPQCASQGCFNENICCQLWGLAGECRRNPTWMNCFCKVSCGKCIPQDYVFGXSCTDYHPRCWEWAEEGECRNNAWMSENCKQSCGTCVSQYELKQMCRRGGRGKRQISMLLEGAAGSPPGGHSEDQKDSLGPPKTAASGAKEFISGQK

SEQ ID NO: 162693 - protein, 209 aa, Heterodera glycines
MINFRVSFAAASFRFGSGCQSIVNRFAHSLSSIASSEPDAPSMLTQIPGPKSKALKEEMEQVHQTTSINFFADYERSFGNYLIDADGNALLDLFTQISSLPLGYNHPELIKLATDARLITTAVSRPALGAFPRSDFAQLVARSLHSVAPRGLRHVQTMLCGSSANENAIKTAFIHYQTRLRGGSPPTAQHLSSCMRNEAPGTPQLSCLG

SEQ ID NO: 162694 - protein, 208 aa, Heterodera glycines
MELEIFKDACGQTALKLVGRHPITVTASAVPDLPTFETIRVSFFDGFVAAVFTERKKQLSRNRIELAIFSQPTDESKNAFKSLWSLFNSQIGAITSVCNASAADRRNAKNTSIYNLDPNFDTVPDWLVAPTLRRVDGVFGLETIYKWIHNDEGGDVVKTFTMHPPEEGVKIPAGDFERFLLSFFRFRGAKTPGYTAKFKHGVVDKYVR

SEQ ID NO: 162695 - protein, 172 aa, Heterodera glycines
MNQQKSAKRATRGQRQIYEENKQTLLCYVLASICSSVLVFSLNYFLFLPQKGAWIGLALSSASQAFSVILMSMMMKTVRNERNLLVDAGLDLNDPNAFGEYCKDIVILSVSAQLLSLIWTGFFFVLLSIPFFTLYKLWTNILGPWFFRPTLDDDEKEDKKKQKKPKFVHVRR

SEQ ID NO: 162696 - protein, 224 aa, Heterodera glycines
GAQVQLQHNAGAANAAPSDGFFNVLIRLLEKREHQIIENPCPPCDSEDEVVLKVGPEQFTVSKHFLMSVSPVFHKMFSVDMLEKAQGEVSLEETNGEEFGAFLDAISPKMASPNPANVMGMLKLADRFQVDALRTRCEAHLINCVEISLIERLLCFEMYRLEKLKNFILKSLNGVGMREFCEENQAALNLLSKDLLIQLTVRICSSSKIDRSALCHNCTKNLNE

SEQ ID NO: 162697 - protein, 209 aa, Heterodera glycines
QILTQQAQFEEARKQYLEGTRRSPHSIAIWLLLIRLEDSRGRHIKARSQLDIAKTKNSKCDQLWLEGIRMELRAGQKELAQSMLARALQECEHSGRLWAEAIFMEQRHARKTKIVDALKKCEHDPNVLLAGSKLVWAERKTKKARSWFQRTVKVDPDFGDAWAYFYRFELMHGTQEEQEEVKKRCLQSEPRHGELWQEASKDVKNWRKK

SEQ ID NO: 162698 - protein, 169 aa, Heterodera glycines
MECVRHLLHLLLLLTFSGQLLVTLADLYDDYEQCKSSGHFGAEDGSPSLVCDSEGRLTPQALAQLNGILTDMGRDAGCQCADGCDGKPFSVRLLVTSGERVEQSGGTTALNETAGRIWESEGMGTEQCDNGMLMLYIRDQKRMVTFQGHRRLQIYSDRDIDNLHELTSR

SEQ ID NO: 162699 - protein, 199 aa, Heterodera glycines
MANSSLSRPFGLCLCSLLLFICAFPPISTQRVNVTLFTESQCPFCTRLLREQIWQFHSRFPGIMNLQVIPFGKGNCEFTRDRRIICKCMHGPTECDLNRLQNCAISYFPRRHIGLVTCIQGLKNLDEAYRRCLSRLSPRTQFRLKQCAETQTGEVLNYVSMLNTHRAGVRIWPTAYVNGHFFDRSYPMETKICEHTAWC

SEQ ID NO: 162700 - protein, 178 aa, Heterodera glycines
  unsure (1)..(178): unsure at all Xaa locations
QHNAKDIWSEVSQLKGMPLLVAGNRTARSAYGSCQECCSGGAQGQPGQPGQPGXPPPCTPCPGGQPGNNGPPGPPGAPGAPGQPGTGGGQPQPGEPGPPGPNGQPGQPGQPGAPGQPGAAGQPGPKGPPGGPGQPGNGGAPGQPGQPGQPGNPGERGICPKYCAVDGGVFFEDGTPRR

SEQ ID NO: 162701 - protein, 221 aa, Heterodera glycines
  unsure (1)..(221): unsure at all Xaa locations
LKLCLTIILVTIGYKSFSLSEHISEFSECGISDFEPEFPIAPKVEIGTNHIFKGKTIVDDKSLPWMARILSGVSCTATIIGPRHVLTAAHCVEGQALENFVVSYGSADASNQQHKSGVEAIKYHPKTQHYEIKDKFRKNTRAYLFLNDIGVIKIKNSIKLSQNARPICXLHGFHLTNSTKSDGKSIKYDEYSKFINNTQCVVAGWGITKPTCSNDDDKPLS

SEQ ID NO: 162702 - protein, 193 aa, Heterodera glycines
MSDEISALVIDNGSGMCKAGFAGDDAPRSVFPSIVGRPRHHNVMAGMGQKDSYVGDEAQSKRGILTLKYPIEHGIVNNWDDMEKIWHHTFYNELRVAPEEHPVLLTEAPLNPKVNREKMTQIMFETFNTPAFYVQIQAVLSLYASGRTTGIVLDSGDGGTHTVPIYESYALPHAIQRLDLAGRDLTHHLQTIL

SEQ ID NO: 162703 - protein, 203 aa, Heterodera glycines
SKVPSLLRTDSKNRKCTDVMALFSLPRQLALFKRTETIVCDGTFKMAPRGIYQIYRVFGFIAQTHCVPLATALLRGKSRVLYDQFWTRLRQELDKIPGILMISQANFDYESASVNAFCDVFPTVRPKMCAFHVKQAINRRIQSMGFMQLYSSKEPNGLEFQRLPVRFNSRAISSHAPPLETLQQGALSELLDYCNNTWINNRI

SEQ ID NO: 162704 - protein, 215 aa, Heterodera glycines
MSIKNYELRLSKNADEQSEAFYCYLKSVIEERSKCRQTVIIGFSGGSMPAFLAQQLVRLSDQTIAGLRLFPVDERHVSVNSEESNAGTLLRLLPDKFRENVLSIQPDDSGLLTAQRFEQQLRVLSPQLDVNGWPVFDLLLLGLGPDGHTCSLFPGHPLLKEESVWVAPIDDSPKPPPRRITITIPLLNAAANLAFIANGASKAAVLKKILWIMIK

SEQ ID NO: 162705 - protein, 221 aa, Heterodera glycines
MQDDWRSLTYEEANATLKKWREEHARRSEEVVEIWEFVLSRYAAALKGELWAVLEQVTIAALDQARHDLAIECLQQLHRRFPKSTRVTKLQAMRLEAIGNYEDAEELYRRLIEGDDTNPLFRKRCIAILIARGDRQLAIRELNKYLEIFANDSEAWLQQGELFLQEADFGRAAFCFEELLLSNPQNPTYLLKMAEIRYTLGGTDNVEDARAYYERSLALAP

SEQ ID NO: 162706 - protein, 132 aa, Heterodera glycines
MAEDEVDDLLEEAFKNVDEAEKNGTKMDDVIKKKAKEVGIKMSDSEGKRKRSRSGSRERKRRRSRSREKKKRDSSRERRRRSPSENSKRKRRSRDRRRSRSRSRDRRRSPISRRRSRSRSPLEKRRSPAPRR

SEQ ID NO: 162707 - protein, 113 aa, Heterodera glycines
GDRIDGKTVEWVTEKKFGGTVKFDAEIEAGIFRFDQCEDHHCGVGTQQKRNLTDKWTKCTICHPSQKHLCPWHYPLGTAIFTKTQIHGRSPSSNPNKQSFENGKFKKKRRGTM

SEQ ID NO: 162708 - protein, 163 aa, Heterodera glycines
SKAGNLAKGVDRLLKAIDKAHKKLCIREKLCDEFIENGRKLTREYLRKSAKEESAEMLEVFEFVPIDHHGNFDYSLMANLSLPRTSIDSSAGGAFSPNNNPSISNIAINFLADYRPFAYGVPITRDSPSATVISRCKSPFCKMSADDERRLSLRCRCLRLAWT

SEQ ID NO: 162709 - protein, 189 aa, Heterodera glycines
EGFVDEHHQQQHISTSVHANMQEDGAEVLHHEDTSPTHKNHETATGGEKGGGQGQQHGDGSFGDIMVYQAIHTIEFALGCISHTASYLRLWALSLAHAQLSDVLWSMVLRNGFVQSGYLGAVITYLIFIVFGTLTLSILVLMEGLSAFLHALRLHWVEFQSKFYGGMGHPFVPFSFEKILEESRQSEDS

SEQ ID NO: 162710 - protein, 213 aa, Heterodera glycines
  unsure (1)..(213): unsure at all Xaa locations
MVKFWLTLFFVFTGNNLYSIFAHKPNFSQCGISDFEPDLDNVPNVKIGTNHIYKGQPVENANSMPWMVTLLSLQGLCTGTIISHKYILTAYHCVSGIISVPSSIQISYGTVNVANEKHKTNARNIIIHPNASLSEMRVKINGSEFGTDSVSNDLAIIEVENALKFSPNVGPICLFGLDASGNDKFGTFSPLINSQXLXAGWGLTQPMCQKYPT

SEQ ID NO: 162711 - protein, 308 aa, Heterodera glycines
VLSVLLHHTRHHLSTVTILFIFNILFSNVLFLASFLCLYSDIALDTKYTRPIANSNEEAEEDSADASAEDEDTTTPQLFIAEILQIHLYKPSEFLKNLIQETLLSLAQNGSLLGLTNLLVLVLVVINRSMSGKGIRISRAKVIAVFAGVWLFLVVSHVLFSALQYFAVSQLHELLELTSSNPSQFACRRSATFMVYNEIGERCDRLAVYQELGHFLLKGHTLFTVVLLSISLVIFVITVYCHRRVQRQHHFLNENATNGKNAGGRSDGGTDSEAGGSTVRRRRDSSPFRRRETLFQTLVLSLIAFFLS

SEQ ID NO: 162712 - protein, 266 aa, Heterodera glycines
MSGFSEGTFHRNSTPNNTLATTAVPANYKMSMINDRNLFGNTLLSISPLHDDQSKSGRLVPLLMRHQKEAKSINQQQAFLGRSTSVRDRAAQLRKPIDLDEVAIDAAPFQLVIGTSLYRVHTLFALLGLNHAYVTNRGRLVGVVALRELRAALAHIYTRGALPTAQSMSRLRLNSLNFGLCSTDRSRANSGVEGNSDNLNGSSLRTAMSPTSLSGPLTQSTTVTGEETSDGTLQNLFLTDETQRILSLDDTLPKFLITCPLRSYPS

SEQ ID NO: 162713 - protein, 126 aa, Heterodera glycines
HKPTRVSVKVMDERYLAQNIKIAHQRLAAILLKQKVDEATRRHESHRKLRVGTMERAEKIRTYNYRDNRITDHRLKVTVHGVGQFLDGGQMLEQMVDALIEMYEQESVEQTGEQPKNEEEETGKKV

SEQ ID NO: 162714 - protein, 225 aa, Heterodera glycines
FTFSQKPEKRPKKDDTNENNDTFEQNTQSNSFVGAAISALQLSAKDVDTTFQGIVEQTVFRGSADGNPFAIRECTGSLLVLLGHAATITIDKCSNCVIICGPCRGSIFMRNCANCLLLAACHQFRLQNSRDIEAHLHCSTNPTIEDSDLIVAPLLMRYDGFKEDMESARLDNAPNLWDKVQNFTAETGQFQRMNFDPFANGAINSEVVSDELLEKLSTVMEEPEA

SEQ ID NO: 162715 - protein, 94 aa, Heterodera glycines
LTAKWEKHRRQEPTKLWNRVIVDNLTARRMRREQSNRKEEEKATEERDERHKDEEEGEEEEKQREGEEKQGEEMEEAMGTSRKQSEKRDICQIY

SEQ ID NO: 162716 - protein, 166 aa, Heterodera glycines
LQRDRIMTQILLRLAKHKHGMALTRNSRHGFRCFCGWTNANSCALFCTPSMFSLVFCGHCSPTRMFCCWHCFVPVLSRSLCRWHFTNYKKPHTNSRWCWPKPCSRRRRAEPPAERFSNLSATIWKRPDCSPPLILCWNWCQKAKLTSECQFCSIAVKWRTKTQIPA

SEQ ID NO: 162717 - protein, 181 aa, Heterodera glycines
HNGKDGAPGRDAQSIPAPLEEPCIICPPGPAGPQGPAGPKGPPGPKGSPGEPPKDGVPGEQGMQGLPGPVGRPGREGPRGAPGQPGRLIPVPGPQGPPGPSGPPGEQGPKGQPGPDGQSFEGPPGPPGDAGRPGREGRPGGTGPSGPPGQDGEKGSCDHCPEPRTPPGYFVEAGKSGGHYH

SEQ ID NO: 162718 - protein, 218 aa, Heterodera glycines
VSLGQRSHRFDVRSVCIASDSSFFVTGSHDCALVWDSETLSPVNKLTEDGLSQISASIVVFGDKQIVLGTRTGALFLFDLLSCELLAMDDKAHESAISEICAFPEKDGFISCGNDKQARFWHYEWLSELDGSKHLSMRSVRRLELNDEALCAALSPNGKFVAFGMLDTTARVFFRDSLKFFVSLYGHSLPIYCIDISADSKLVVTGSADKSVKIWGLD

SEQ ID NO: 162719 - protein, 179 aa, Heterodera glycines
MNRRWICGDVWMDILPSFDRPQLGLKMALLSDRFDVLVDKHFDRKSELTIWRRIRIDKDKGPKAKLSVLIDDKCVAFPLPDHSLPIKIRFKELQIDYIGHSVITFLSSNQQIWDRKGTNLDLFIFATDHNNIQSIWDVLAREIWPIFATNIRHLAFRNGDHLDNLRSYTSPKILTDLDQ

SEQ ID NO: 162720 - protein, 202 aa, Heterodera glycines
MISRLFLQPNNLPSIRYLATSAFSKARYGFRPSGGAGQYAFRFKEAFAARQVAPTLRERLLGPTTGKPFIVGTYALAGASVFGIGMLCYYGLTTTVDSAAVRSNLWPDYVRQRLQSTYAYLAGSLALTAGAGVAAARSPGILALTSAPSLLVWFGSLAAIIGSGIVVQKIDYHGNSAAKHLAWLAHCGILGAVLAPLCFVGG

SEQ ID NO: 162721 - protein, 189 aa, Heterodera glycines
MSSSHRETGRSPRSVLMRQYEMLLQNSNDNSGFRAWFDNNNLFKWRILIDGPPGTPYAGCKLTALLHFPASYSNDPPTMTFLTDILHPNIDQSGKVCISILHAPGIDPLGHEQPSERWNPNRSVESILVSIQVLLAEPNFNSPANVDAAILFRNDPAQYRKEVRRRVERASASTPRARSSSTPPPVAQP

SEQ ID NO: 162722 - protein, 141 aa, Heterodera glycines
  unsure (1)..(141): unsure at all Xaa locations
SLRRVFGKLVVPSAPLGRRRFLHILGIESSCDDAAVAIVNWEERRVLADRRSADNDSLLRLGGVSPYVSAXHRSMIGPLIENALSDSDLRSSDIDAVSVSNCPGLVYCLKVGVEHALAFARCWKELMTNRAQLINWLISPN

SEQ ID NO: 162723 - protein, 198 aa, Heterodera glycines
LVFKPNAQMGRPFLPLAFSLVLLLLAVVISTNCANASPIVGEEQPMAPEQKATKGTNDGQMGDDNRTNRRNNMAAAQHQQQNRNATSLVALGWLGLRSGASSVNAVNVASCYDSRLSSFINDGLRYYSHNMGQLSKYIIDQIKRVRYSGYWFVHAAMIGGQTQGLQWQSQSNGDIFAQTSRHGCYYHDTQTYIIIIRY

SEQ ID NO: 162724 - protein, 307 aa, Heterodera glycines
MPKNDRSAHPPHSQSAPAEDNTEIDCVDRGIHNFGQLRLNFENSRVTRLTLSHNKLTSIPANISDLVNLEQLNLWNNHIEELPVTISALPNLKLLNVGMNRLYKLPRGFGSFAKLELLDLTYNNLREQSLPGNFFFMPTLRALYLGDNDFESFPEDIGHLTNLQVLVLRENDLIDLPRQMGTLQKLKELHIQGNRLQVIPPELGQLDLIDPNDENAKTLRVENNPWIVPLKDALTRGAQGGDWQSGVESFWNYIRSDNYRRLYESHPVGVGSPPPKRNKEKKVSRVKGSAAGGAAEGSRGQSRERTE

SEQ ID NO: 162725 - protein, 62 aa, Heterodera glycines
FLLLFLFHYLFIDNPIIGAINFTDQRPNPMPIPLPMPMPIPPPMPIPPPIPPPNPPPPIPPP

SEQ ID NO: 162726 - protein, 423 aa, Heterodera glycines
MSTDRYDIVLYGASGFTGQHVLESFVKNGHLDQFNFAVAGRSEKKLKQTLEDIEFITGKVLTKIPIIIADSSDAQQLAEMAKQAKVIVNVVGPYRLYGEAVVKAAVENGASHVDISGEPAWIEAMQMKYSEKAKEQGVFIVSACGWDSVPCDLGMNYLKQYFKGTLSHAETFAHIQIGEAGYSFNAGTYQTLILGLWQAKNDDLGKIRRSIMPEKMEKTKWRPPKRGMFWWNDSLDAYCLPFMGADKSIVQRSQYFDNIADKTYPASLETYILVKSWFWAVALMMWLTIFNFAVKFDFTRGILQKNPGICSGYLFKETGPTRVQAQQASFTYWFFGWGWEQSSPQPDEAPTKRMVVRCDGPDAGYIGTAGCILSCALTILKERSAMPSEGGVFTTAEAFKNTNIYETLSSFGVTFRVDSSVKV

SEQ ID NO: 162727 - protein, 197 aa, Heterodera glycines
MLFSLSHFSPIVQSLFASLFTWAVTALGAAVVFVFPSSNRVFLDASLGFSSGVMLAASFWSLLSPAIEISERQMAKLAFVPVAVGFALGAFFVYLSDRLTQNFNGSALSDQINQLENWHSANQQNGIHSENAPFDFETDRQRSENPENAGELAASLRQRCVKAPNSKGMADKETIRLDGQQQQNDQQQQQKRSQEQS

SEQ ID NO: 162728 - protein, 209 aa, Heterodera glycines
MGLPIIQIYMIVARQLSKPITGYFMGLGKEHPAFRNRVLIPIGKTITNWSTKLRMKNLDLGSPTSVVNVSEETALEQASEVIHQVAIFGYTVVVFYAYSYFTHKEEKELASAEELRELSKKTSQEIMRLNVLVTELQDEMRMPRRDRNWTFPWSGESKSALRESAVVNPMLPSVVMTDSQPKEQKKDMTKSISRTEALNRLTNATETSS

SEQ ID NO: 162729 - protein, 125 aa, Heterodera glycines
QNALLITLISVQQAIRCLTSTASSTISQIVYHDAYVASAQRSLGFLVSAAHRRRLGRTTRRRAAAAPKSALASSCAVILTLIVLVIGGLVLAAVLTPETFKNAPLLSLFVGKKNGGVDGEEKETE

SEQ ID NO: 162730 - protein, 214 aa, Heterodera glycines
  unsure (1)..(214): unsure at all Xaa locations
MCHIETYIFMDFETTGLFDDGHNNPLTNPNRSNETARERAQRLDNLIKSDGNRFPKITEMAYMSVPRVLFLEGTEQMSARHLSSMSQDGEESIEPVQVVTNVHVRQLNPQLNDKERFKYEEXNGKCQEWPGVVHLLQTVPKPACLVAHNGLNFDFRILCHELRKSDLFRTHPIPEQVYFLDTLSCFYELEKEYNREIELTMENVDWTLVLSQFQ

SEQ ID NO: 162731 - protein, 218 aa, Heterodera glycines
ATKSPIPGVIRRTFVLPSCKGHKQQQQVSIGDEKDGKTTTLLVPMFSQELASLLAPEQSTDFSIRLQSKSNNCISLRVQVCCTLPSKSENEGQPLEEPAELVQHFPIRCVDPFEPKIAIFCENGGKAQCLVFGQKFRVQLQLKCNGRVAVHNVHWKLNDAFEHFDAIPLDSLIKQHFEKLKISSVDSSEFLNTHSVWVKVTNGDGQSPMRETGQSNGG

SEQ ID NO: 162732 - protein, 200 aa, Heterodera glycines
MLSVWLDLAPKCAIAEAIASGTGTTVGGTARTSASKRGGKAAAAAAAPAGVATQPHDPNREMRDAFKRLDRAYFFSSYSQMISRITHSDAATYALLKEMLSELIVHFPHRSLWLSQSIVRSTRVAVRSKRCLEIFELAKKKARSNNDNNAAVVDLNLLIQQYDYLTTLPMSVGGQVARLIEIATDDAKLSAMYIGWCPFI

SEQ ID NO: 162733 - protein, 161 aa, Heterodera glycines
AYQNNFPIITHRQFGHSSSAASFLLRRIAVLVLLLLPHNDGSPRLPGPPIFEAISHYPSICYLPPESGMCPPATNRTTDTDHIKVAAATVDDSRATVGEGLADGDDDASQLRHASTPLLTRYYFDAVTAQCYPFGAQTCGGNENRFETKEKCLTKCRIGTD

SEQ ID NO: 162734 - protein, 229 aa, Heterodera glycines
KKERISLCSFAVPSPIFPSSPFIHFSSQFLPQNALLRWPLFLFRFAHPSFLLLDSAVHFALGAFLFFCPSTCAHFLLKRPSSDGVHWHLLRCVGGQLMASATLSWRCASPRRLPELRSSCLMLRLLGSVLFVFLFLHIRAVHPDLMPFLVLRQLIWFCFSMIALCVALLIVSGWPIGDKLFAANRWGNVLYQIDTIASISIGMAWVMAPQWLLHRQVRVPMDQSHEFCG

SEQ ID NO: 162735 - protein, 180 aa, Heterodera glycines
MAGINRTSTTPDENSKPMELTDKGKTPKLKQQTLSRFFGTMTKNSAPTPVPPMGQQQLQNYTNPKQKQPRKRSSPGSLSTSSSSSIIAISSTSPTAVPDSVSPPFRPLETTGPTNSKATKLHNAEEMLAKADNEQRRVQRFVNRLKKSFNELDRESLAKNLAFTAVRLDSDGVDKIQNSF

SEQ ID NO: 162736 - protein, 280 aa, Heterodera glycines
FSKKLENAKHPMIVVGAQAFQGENSSSLLQKLHQLAEKLRSTSQTKQNTKGNGQPKVLNLLHEFAGHVAAFDLGFRPFNELNSEVKRSIKLLYLLGSDEKPISRKEFHPDVFVIYQGHHGDNGAEVADLVLPGGAYTEKEATWVNMEGRAQRGYPAVVPPGDARVDWKIIRALSEVAGRKLRYDSLDDIRQRLSEIAPHLTRYGLAEDANFSRQALILSQKVPISASNKNLEPRQRSLSDYWLTNSIARASPTMAQCVKASRDYAVQPHTDPLRLANPHA

SEQ ID NO: 162737 - protein, 231 aa, Heterodera glycines
MSSGGYNNQSNYPGGAHPQQYGTGNTGNAGGYPPAAPPSAGAYPPQQYGGIAPPYGTAGYPPQYQPTPYPTSTGAMSAPSIRANPNFNAQMTAELLRKAMKGFGCDKSKVIQALVNCNNAQRQEVIRTFKQMYGKELIPELKSELTGDFEHLIIALMELPAVYDAAQLRRSMEGLGTKEHILIEIMTTRPNAQIYAVKMAYRQMYNSDLERDIIGETSGYFQRLLISLCSG

SEQ ID NO: 162738 - protein, 214 aa, Heterodera glycines
VVTSALDDLQRKARLLENEIDAQLISLNKFNPSDALSSYSYNSNQTKGQGKRAVFDSLTTDIENKLSKLSEINDAMRDCFENDMAEFSKTSVQHIVRRHRDILRDYSTEFTRTTSNIGNQLHREELMAIESESSVNNRCKPTDYLLKEHESISSCDRLLNEQISIAMSVKENLYTQSTGLGSIGKRLNQLTKKYPAINHLMNKIRMKKRKDTLI

SEQ ID NO: 162739 - protein, 208 aa, Heterodera glycines
MSDHPREEKRIFEKIFICNDILLDSLPFCGHAKIGLEFAVVSYRFDVVADTHLKRRKWKLGSLRIERSSTNDGAEIVKCNSDKTVKRLPIPLKPLPPNLIGFKRIAVYHINRKVIAFLHRIQRLFATDITLELAIFFRQRQSWDVVTYGIWPALNAARIVKIRFHNINNVTALQTHISPTILHDCANLRSIDVNHIYRPLTGQIGDEF

SEQ ID NO: 162740 - protein, 203 aa, Heterodera glycines
MATVAVHVLLDSRVPAQFHSKFIHSFPFRCICPLFRGNVEGHLCILPNGKPLKRAIRKDFRQFSHEEMALFLEVMGRYKSSGLYTRLGMIHRRSGVHSGPSFLTWHREFLKRLEIIFRSLFPQNTDPSLGLPYWDSSLDGDLPSPEDSVMFSEFLLGEADNSGFVFNGLFPNWTTMDGRHSYQRMFGDQQDGEFLNEARIDWV

SEQ ID NO: 162741 - protein, 217 aa, Heterodera glycines
MDKDVKPEDPSVSFGFLSEEAREAMLKNCLSGAVDCKAQPFGMIQKRTMVLQHEMDFMRKVRPYQSGEMVQKRVEMVQKLKQKMLEVAGLDEHVQPVNDGTFQHDVLLTEKQSEELIKALNNVPKPAKKLHRYGYGHRFKRASLFLEQFAAQKWPIGQPIAFFFDPKIEEFEKQMVRQAHQMIEAQTCIRFRPSDSKPNSDFLYYIKVSTPTFCGLS

SEQ ID NO: 162742 - protein, 243 aa, Heterodera glycines
QEVFGKQPSKAVNPDEAVAIGAAIQGGVLAGHVTDLLLLDVTPLSLGIETLGGVFTKLITRNTTIPTKKSQVFSTAADGQTQVEIKVFQGERDMALDNKMLGQFSLVGIPPAPRGVPQIEVAFDIDANGIVNVSARDRGTGKEQQIIIQSSGGLNKDQIENMVREAERHAAADAEKKETIEAINHAESVLHDTESKITEYAEHLNADEVNVVKEKLEELKKKLANREGLKSAEVKESVNELQQ

SEQ ID NO: 162743 - protein, 306 aa, Heterodera glycines
EVDFEDEGDYEQLNANQNRKQKKAGGWQSMGLDHSVFKGILRKGYRQPTPIQRKAIPLMCDGRDLVAMSRTGSGKTAAFVVPLLQRLKQRDARGIRALLFSPTRELALQTFKIVKELGRFTGLYCACLIGGDSMDEQFNALHQHPDILIATPGRLLHLVVEMNLKLQTVQFVVFDEADRLFEVGFADQLKEILKRIPDSRQTLLFSATLPKMLVDFAKAGLSDPELVRLDVESKLSDKLSMAFALCRQVEKLPVLLNLCRVLCKQKKKTIIFCATMKHVEHVVAVFQEANLDPAYLFSQLDPGARK

SEQ ID NO: 162744 - protein, 193 aa, Heterodera glycines
MDFTAGNTPNLFEVLLRNFCSESSSIQEKAVSSIPSIEQRFAEVETNEFKAAFGELSGGTLRLVADDRPSTSAEANDQQYKPIEIVIGDDAEIVQQPSSSSSLISSHPETVQDAKVYARIRELREAGLWSATRLPKCEDPPRRKLHWDYLLEKMRWIATDFTNDRKGEKRSGPESWQSERRPNGTGCSVQPTK

SEQ ID NO: 162745 - protein, 199 aa, Heterodera glycines
LDLSINSTVILRDEWLLLGAQEGLFATPMSPQQLRAPFRIAGVSCVYWMELLPEFDMLLAICGSARQLAVIHLQQIHRAFKVAQQPTVSCTNIANIEQCHIAVVSNSEHHRDKRTITDDRSLFKCRAAHRTGNGLNAGELLFTVSSEDRVELHIFGHADAAHLQQPQQHQQSVKSILKRKILIHAFRQLLFILSNLIFV

SEQ ID NO: 162746 - protein, 384 aa, Heterodera glycines
MGFLGKLSIGLSVIFLGIAVWFSTSKFLPKEYHLPPPPALTGLLTVNKPKVLEKLLEGQVLGPESAVIENDVIYTCTLDGMCLKIVDGKIEKSVPVTAHATNCDGKRKTIPICGRPLGIRRFNSQQFIVADAVLGLLLINFEEETKEVLLPSITVVDKKRLGFPDDLDIVDNDTILFTDLSAKYGYSDCDLAFFEHVRDGRLLEYKVSTGQLRVLMDGLAVANGVQLHPDKNSVLVCETAMARIHRYYFAGPKKGMQQIFVDNLPGFPDNIRISRSADSFYVALPFHRSEQKPHIFDRLGPWPLARKFIGELLKILPDNVLQRFVVGSTHGIVLQLDLNGMILRSWHDPEGSVISHISEVDDDGGDFLYLSSFVNNYIGRMSKE

SEQ ID NO: 162747 - protein, 291 aa, Heterodera glycines
MSAFLQKKSDEESLKMATGFWCQYRQTTHQQTLHVKLHNFQMDNQLPASTFPSLLAMVPQPKYMVKNGCLFKSFWHKCYKFFISDPKPFLECAFVMSQSEHTNIVQIKLLEALVQEFAIRIDRTLLNELLDIIPKETIQTGYTRESFQMDMELTEKALNKRAIQTRVTQAKAYYQRMHISPLMIHLSFSQGHVEEEGTDRAGIQWEFMNLILKSVGVTLTEIQDVIFKLAFFQREATFYSRAQLQSEIQAHYTRQFIKQLYALVLGLDILGNPFGLVRDLRTGAVDLFYQP

SEQ ID NO: 162748 - protein, 211 aa, Heterodera glycines
ATFKTPDNNTKKFCKTKGSPLFKKFSKTRQMERDRILFQRQRFPTVASIHHQPATSSASGVLVPIPTTDGAAAVPGSAGGYQRRYSTHREQQLQQRNRRDSKFSRRLAVYTSPPEDSAAGAISLRPLNTTIISSSPRTGSSSDAELDTDEIANAAATTERRRRLQQRQRRRLSADDGESQVIAASPSRRQLLTQPLTNPDAGLIPQIDKPM

SEQ ID NO: 162749 - protein, 278 aa, Heterodera glycines
LCFINSLLLSSPPPHNLFPSSIRSPSVSPFYFLYFCFSVRADPPVLIHSFLPLLLHLPSLFCVFCCSSIAMEQQNITYYPTEIVHGQTNGDSQEQFHREHVFHSDANVNFHATNDTNFGGGGRRAAFRPSQLQQRQQHIVVQQGPTSIPQRVSTTNIPASTAGQQTVHVQLVPHNQQGNSPIPGQQQQQRQQIVVQHAPTSMPQRISTTSIPTSTASGQQTVHLQLVPQQGNSPIPGQQQQQQQQQHIIISAQPVQTTNTTTESADGNPIAAFMEYFV

SEQ ID NO: 162750 - protein, 188 aa, Heterodera glycines
ATVWSKFASQLSSWLSEMPSEKRRGRAETRPNGGDGVAGVRNSRSLSALSRRHNLVRTSKSSENLHRISLLSTATTIGNGQQRQKPFLAQFGLNGPNAHSEEGSVPCQNSRKGSVEGHQSPLTPARTKTRRFPFFGKENETTAAPGGEGESGYSSGSSSRRKKSNGRFVPCASFLGIFPQFKRAAQKQ

SEQ ID NO: 162751 - protein, 202 aa, Heterodera glycines
MASSLYNFKKITVVPSASDLKDVVLSKTQRKTPTVVRKSWQISRIRAFYARKIKFLQQTLHDKLTSIITEFPKLEDVHPFYSDLMNILYDRDHYKIAMGQMNTARHLVDGIAREYVRLMKYADSLYRCKMLKRAALGRMVKLLRRQKSSFEYLEQVRQHLSRLPSIDPNTRTLILCGFPNVGKSSFINKVTRADVEVQPYAF

SEQ ID NO: 162752 - protein, 88 aa, Heterodera glycines
ICSDETINALKLRIYEKIDQSPVDQLLYMGGQVLDGNLTLERARVPANNFDNPLILIVQQRRKSGDDDDSDQKAGSSGGGGFHDTALS

SEQ ID NO: 162753 - protein, 160 aa, Heterodera glycines
MNKMGPTSENDGPKKQKKGGRRRDGMPKPTPKPKGMAAASTALRQLSPLHKVLLVVVALLQWTTTGGRAALLQGCDFSEDLCTDGEVCLPDRLFGQCYSDDESALVRPLVLNRPINGVQSELLRAELTQLAELGLDWPDARAQCVLAYFKLGVGFRLDYN

SEQ ID NO: 162754 - protein, 219 aa, Heterodera glycines
YICTISLPPGNNRFYLFTNVEPYAEEADGVFWSTHSRDVYNEKPLKEDMITAIEVMGFVLPHPFISPFLFSNFMYLRLFPDKTPRTVENFCTHARRGYYNGHAFHRVIKSFMIQTGDPTGRGTGGQSIWGGDFEDEFHPALRHDKAFRVSMANAGPNTNGSQFFITICPAEWLDGKNTIFGQVVEGFNVVQKINQVPVYEKSGRPREEISIISISLKSV

SEQ ID NO: 162755 - protein, 238 aa, Heterodera glycines
MISNLFGTHPLRTEIKKKRPSQRRGNAEEETFHFIIDCHGKFDAKDTRNFNSSLVEEVSRHPALFDFTRDEYKSTEARNRHWAEVAEEMQQSVEFVRTRWKTLRDRFKKEVRRQHQCVEGPIWQHYDKMLYLLPFIRDKDDSTEVGTTVSNGSVGIRSKNGARRAEGPTDNTDRGTTLWHGEREQKRRTNNGNLLHPSPINSCTAAILDLAMSAVTKLSPPPTDEMTSSDGRQCAISE

SEQ ID NO: 162756 - protein, 273 aa, Heterodera glycines
RISESEEESEAEHQSRQKADRSRSELQRELEELSERLDEAGGATSAQIEVNKKREAELAKLRRDLEENNLNHETQLNALRKKHNDAVAELTDQLEQKQKIKVKVEKDKQQIQRELEDATQTADSELRARQEAEKVIKNIELQLSELQSKTDEQSRLLNDFAALKSRLHNENADLEHQVEDLENQVNSLHRLKSQLVSQLEEAKRTADEESRERQTLAGQLKNVHYENDSLREQLDDEQEGKAECLRQISKLNAEIQQWKARFESEGLVKMEEI

SEQ ID NO: 162757 - protein, 212 aa, Heterodera glycines
MSDQQSGSSSSSAVLTSPTPFPPQQQKPPLLRRCSMSEPHLDIVPHFLKEEKSVHPFDRVLSGLFDKGSTFSVNSTDSVDHHYSAKSDRHDHPFSPTNQQLTKGKSAIGMMSNSAAVAPSSADGLLRKSATSASALYSSSPQHGTTANHFPTIPEDQGLTMSAGRDKMPQTAASASPPKSGFMNFFGTGGFLSRPVTHTPEENYRLIMALDR

SEQ ID NO: 162758 - protein, 279 aa, Heterodera glycines
  unsure (1)..(279): unsure at all Xaa locations
DEMVNSVFGVKQEGNVPALADPHGELRGKNILHRVDEYEMSKIASXNKMTIEQLKQCMEDAKRFLALVRSKRPSPHLDNKILTAWNALAISGFCAAAQAVPTRAAEFQKRAEKAVAFIRSHLFHGGELLRSAYLDNLGQVVQIRHPIKAFADDYAFLIEALLSLYSLNLDENLLQWAHNLQLQMDELFWDSTFDSGYFMSRVGDPSIIVRMQDEQDGAEPCTNSVAASNLLCLGFLLDSADFRRRANDCFAGAAKRIEKYPFIMPRMLIALHAATHPPY

SEQ ID NO: 162759 - protein, 200 aa, Heterodera glycines
RRKRPKRINKNKLSIRHHTTKIKSKGKNKRRQKAAKIAEPKVKKIMELAKELIAEVLRDRTKQFSSGDNAKFGLALANADRFLAEGAAVSIHLMMAHANCKASAKEFCEATQTLEVWTFKLQREVPYEVSARPPMLPLFLRQAVRSQLHFSPFRSWLTARQRAGPSDGFLPLLRVCAASDSAAPPFSSDRLQSHQFPPCL

SEQ ID NO: 162760 - protein, 238 aa, Heterodera glycines
AEEAISKYNGEWQIGSPTDEILANDYGLIVRTKARHHAISARLRKPFKFDGSPLVVQYEVKYEQGQECGGGYLKLLRDDASKDLKQFNDKTPYVIMFGPDKCGMTSKVHLILKHKNPKNGTISEHHAKQPSKSLSNYFEDKKNHLYTLVIRPDNAFSVSVDHTEIMSGKLLTDLEPSGVPPKQIPDPEDKKPADWDNREQIADPEAKKPEDWDENQPKEVEDTDAVKPDDWLEEAEAL

SEQ ID NO: 162761 - protein, 268 aa, Heterodera glycines
VWRRTTKLVARVCKEVSGRESVPGKFLKSLETFQYLCNQCAKRWRNSRKKAQLTKKKDDTEKEGAEEQQQATTSKPQADTHAKEESDEATLVRNMVDELAPLWEELSNCLSLLEKAEDSQHAVLCLQNAAEAFFLSYSLVIPQTAQLAQSALPETAPTGDSSPQLASSSAGGNSGEDELGRYQKEMFTFAEKHRSVLNQILRGNTQNLEGSAFAILTHFPKLLDFDVKTKYFHKELKKMDERSRYRHEDVAIRVRRSHLFRDSFRELY

SEQ ID NO: 162762 - protein, 115 aa, Heterodera glycines
LDRRSYTIVELVTFTHMLQSIVPPRFHGVVLCRVWLDFVGDAEQPKERDQLPPITICKTKLATEGRRISNEGGAILTINLWPTTDGMLKGTGIPSLTSLITRKSIEFHFNFPFLT

SEQ ID NO: 162763 - protein, 160 aa, Heterodera glycines
  unsure (1)..(160): unsure at all Xaa locations
MTRQIPSARVSAPACSPSNKRIYSPPFSKRWALPFWAQLAEFGHEFGRILRTMHDANLIHGDLTTANVLVLTQRGPVELALIDFGLAQFSSKPGDKAVDLYVLERAIRSAHIGMGKMMDAILDAYKTEGGGGDEDGTNAKPVLLKLDEVRXQGRKRDMIG

SEQ ID NO: 162764 - protein, 84 aa, Heterodera glycines
TRINYLSYSPKNGSSSTCCQGKILVLQKSLLLIMLKRNKINLFLIINNFVGPRFLDSYVLLLFSTGVCLFWHFLRFAPVFGHIF

SEQ ID NO: 162765 - protein, 208 aa, Heterodera glycines
PFSEYVRFQTLPGAPPPPTDLREEQQLAHALEISFLPPYPPNGILDQYRIRWTVHGKFNYREQRVPAFELECSDSRMRGRLCYRISGLEPEQEYEIQAAAHTERGDWSDWSEPLVTKTTEQDIPVLEHPLELEFAKSTSIGVRWRGLEENLAEHITGYALEYKSETDTDWKEWNGVVRHRARQPDYRAHVKGLTESTEYFFRLRVVGK

SEQ ID NO: 162766 - protein, 176 aa, Heterodera glycines
RRHCSLSLPSTTALCQHITAIKKFHCQLNVLTKLNCITRLSLWLKDQIILFISFPKYHYYLYSCGFLGRKSSFSFFTRFVKLMCNTPKVYDDQDVRWSSVRMSVWWCLCSLWSPSPFMCIKELASFCSKKYRNTTTGKESKFQIFLTYRALFAQNTKFSAPNEWSTPKMVMVSLIW

SEQ ID NO: 162767 - protein, 98 aa, Heterodera glycines
IGMSILFFASLPTLIAMVMTMVIFVKIFIKEIFDPSFVDSIFSHTIFHFYIYKPIFFFAFFFVCLSETINFCFEIPSSYLKIYQILSTLDPYKLWPTC

SEQ ID NO: 162768 - protein, 348 aa, Heterodera glycines
MEQHLGHHQQLHSNQLEKTNFGNGPAGLLSPLHLEGTRRGDPEGSLGLLSSVSVSHLHRPNGGSRTSDLLNGIRRSSNNVAYIKEEINPSNELGGYHSAASVSHHHEAYGDAGPYTLQGPTAQELERMANAETPPALSNVEITSSILASLSRESPSPNIQQQSPHQPTHFIVHQMSRQPQQLEHQIVQRHPITSTPSTTARRSKVKQQSLSQNLGQNSQNSDQQIILASNGSGTQSGYGPMGPGAGIPRTTYSTTDTTDPLNAEIDDEIYIDTKDLCKRVAYELKQHSIPQAIFAERILCRSQGTLSDLLRNPKPWNRLKSGRETFRRMFNWLQQPLHIRLSILDMYK

SEQ ID NO: 162769 - protein, 112 aa, Heterodera glycines
MVLAADTHLPAFVHRHRHFQVTEQLLLQRGDHVLPVVVVVSHDAFAAIGSNDHVSEKIDGFSLFSEDVVDEADVYRQMRKIADREGWEGDGNIVEMSDEVAGGGGGGAGVRG

SEQ ID NO: 162770 - protein, 140 aa, Heterodera glycines
ELQLESEDRYNRFPFSQKEFIEDCPAERLYVRILPEMTEYVIALLKVILASVPSSKEKIDAVTILSDVLTPETDTNEDLSNSISLDLASFSHTNVLEETVRVAIDINRHKELIIKSASSLLILLLKHLRLNHTLQFENLA

SEQ ID NO: 162771 - protein, 155 aa, Heterodera glycines
  unsure (1)..(155): unsure at all Xaa locations
MPHSPLNRRTANPSLEASSPTYSNKRVNADQIRQLCPFPPHXFTSSLTLSSKCFATFPHGTCSLSDSWPYLVLDEVYHLIWAAIPNNPTPRHVKMGRHRQLDRSCTFSGAPVKGNLNKRANPSSRSIRYTSQPQRSCDSTLDSSQFTRRYYGNPR

SEQ ID NO: 162772 - protein, 200 aa, Heterodera glycines
MVVEMSSGAATTASAAAVAGTAPSAGPVPSCICSSTSQLLTAAGMDGIPPAKTPANSGPDANFLADSVGVSPLYRQEDTKRWQTAAKVYQSSRSQMHSPTSGTCAPHHFHFGESLTAEGHLTQKIRQCRSSGSPISLEDIAAENRQFHRQMDSGQHRRVNGPALNGSLELEAIAAVHELASQVKQISVSEILPRTSDLIF

SEQ ID NO: 162773 - protein, 267 aa, Heterodera glycines
  unsure (1)..(267): unsure at all Xaa locations
ELQLSSDYRYNRFPFSQKEFIENWPVERLYAPILPNMTEHAIALLEDDLASLPSYEAKIDAATISIRCXLTPETDTNEEIKSRLFPFGTLTPIPELFKVLSNSITLDLASFSHTNVLEETVRVAIDINRHKELIIKSASSLLILLLKHLRLNHTLQFENLARYLVLANCLPLVLKFLDQNICRYFQAKHELAPFNYPQCALFFVRNGYVCPPLTAENVDGCGGSSDSPSYFLWRNGFSSINLLRVINKLTKGKQSRTQMLVVYKWAP

SEQ ID NO: 162774 - protein, 266 aa, Heterodera glycines
MDAIKKKMQAMKIEKDNAIDRADAAEEKCRQTQERLERVEEELRDTQKKMMATENELDKAQEDLTAANNLLEEKEKKVQEAEAEVASLNRRMVLLEEELDKLEERLKLATEKMEEATANCDESERVRKVMENRSLQDEERANAIEEQLKEAQSLAEEADRKYDEVARKLAMVEADLERAEERAEAGENKIVELEEELRVVGNNLKSLELSEEKALQREEAYEEQVRQMEVRLKEAETRAEFAERSGQKLQKGVDRLEDELVHEKER

SEQ ID NO: 162775 - protein, 259 aa, Heterodera glycines
NSIAMKNLPPELLSEMTLYILYPNKNFPNIFSSSWLLREFLIPHVTKRKEIFKKRRNELERLYNGARQEPIWLCIVSSTGPEKQKQTIDNFLFYLEEYLNYPISNRPTVEEEKELSDRFLLLVKFFYHCEETIAWKYLKTTTSRTVQQFLDELSSFFALVLDLSPEHSQHQQQSDHEAVPTDQTSSADSDLRPLPVVTESVPEESTYDPPWDDRSLRFIETMAALQSHRSTNVLPTVPSTSADSDPRPLPVVTESVPTS

SEQ ID NO: 162776 - protein, 212 aa, Heterodera glycines
SIIVDLLHGQHKSTLTCNVCSKISIKFEPFCFLSVPVPTKEHKAQSTIVFMRAEKWAKFHVTHTSKTTAGQLKQMLREEVQLPSNTQMIIYSTYSNRILKDDSTLSSTYMYNYSMKLYAYAVEPGPVILVENLFMATSPPLFFPRPTKLTRRALLAELVPRVRELCLSLSPTTTTAVEDCGDAGTSSAAPSSSYCTALIPALPASFSSPSSS

SEQ ID NO: 162777 - protein, 209 aa, Heterodera glycines
MLFPSFGMLSSAIHQNQHRRSVHSVRYHSPLLSWPKLFLISIATIPLLLLSCIDFVSAVSDDGAPFLSDQQKRGGARAFNLFASAAFPPPNEKRSGGRAFGGGIQTINDDFDANLAGELKRAGARLFRMSDLSSDGDSFVPEGTKRGGARPFYGGGYIDGAWKRAGGRYFLRQFDDVPFGGGWMAKRGGGRSFFESTKGPFNSANYWAP

SEQ ID NO: 162778 - protein, 122 aa, Heterodera glycines
FRFVKKSNYHCILMILASSSKRLACQFLIRKVPHFAVTSSRKESNWSEVLDEAVPARKSYRDFQTLNGNQRDALAASLFFLLVNGHRLWAHRVLENTWWRGKRCIRGALDNTRGGKKRRGRG

SEQ ID NO: 162779 - protein, 204 aa, Heterodera glycines
MLQITQSECKQMAENGKCSLGLLTNDSGLSHTDKKLDLSPRMWLIGSFSWSIVSTENCYLFKTKIMSQHGSTVMQSPLGSVNNCQFKAGQCEMEDKTLLMWDTNTTRACEFSKIGTCKGLQLDNIWISDEVSFLLTFLNNTKKVNSCGLNLIKSEEGFAVQDLPSDDSNESSKRSRKTRSLESWVTESEMNSKLGYLDEQVREM

SEQ ID NO: 162780 - protein, 261 aa, Heterodera glycines
MGAFLDKPKTEKTNDAGVGRDYKYVVASMQGWRIDMEDAHHVQITIRKESPFEEWSFFAVFDGHAGNKVAFHSAQNLLQTLLNTAEFQAVKEELKTNGPKITEKAKSLIQDGIRMGFLELDSSLGELQGGGERERNGTTAICAILTPDYIFFANLGDSRGLLSRRSNTIFSTEDHKPYLEKERERIIKAGGSVMIQRVNGSLAVSRALGDFEYKSVPGLCVTEQLVSPEPDIYIVPRDKEDDEFLVLACDGIYDVLANEDL

SEQ ID NO: 162781 - protein, 317 aa, Heterodera glycines
EDKKAANNTCSSNNNNSLSDVKQNDDVSSLDSLGVFLNRFRQMDTKKLQQLASNPTVVAQPNRPNEGTAKDTNNDNTSITSTREKMLEVVYGNKLMGKEKQPKFMCFVVDAQERKIRIMSREEQKKQESSAIILEDLTDDQFSRFGKSVKDKEADNSDAFVHCEKCSLFYEFCCLDHPLYQCKDRVPSSSPTEIEDRAAATLPAFLFIQNSSIPSAGKGVFTKVDIPIGIVFGPYEGILTQNLSEMEFGAYTWELRVGYGKPSYYIDAKDPRYFNWMRYINSPRNESEQNLIAFQYQGRVYYRVFSPLTDLRNYWYG

SEQ ID NO: 162782 - protein, 83 aa, Heterodera glycines
MSDMSAYMGSGPAEPAPSSGAAEASSSSGVASAYMGSGPAEPAPSSGAAEASPSSGVASAYMGASPAYEPPAQEKSPDQSAYM

SEQ ID NO: 162783 - protein, 199 aa, Heterodera glycines
LINNKELQMALFANVFTTKYLPKEVTLLVFRRSNSEFFCVRRSPTIFEQTRQQHSNSSPRNDQIQQILDQFDKMQLPSQNEPLATSQQQIVQLSERLIQLALTATNLVCNLLQKNGAAATDQFKGQTKMPTVATIEPKNTKRDGRAAENEKGWTWICEKCRKRNSILRYECQSCEKGHPTEVQREAIGRALTGVWLCFN

SEQ ID NO: 162784 - protein, 296 aa, Heterodera glycines
NTLYVHSLDGRELYKLPLPIGSVGGVFAEKSQSKICVGFEAILDPFIFFFGDFSKCPSRESPLQLTETRRVNVPGMDCDAFHSKQVLYPRDDGTKIPMFIGHRKGVKLDGSNPAILNGYGGFNIAQPPYFSITRLMLAKHFGIVSVIANIRGGSEYGEKWHEAGMLSRKLNVFDDFIAAAEFLISEKYTNNKKLAIHGGSNGGLLTAVCSQQRPDLFGAVVTRVGVLDMLRFNKFTIGAAWATEYGDPDKPGDFSFIYRYSPLHCLRLTNGVNWPATLLMSADHDDRVVPLHTLKY

SEQ ID NO: 162785 - protein, 221 aa, Heterodera glycines
KVSFSFWAPISNKILLFEIKTPKLNSLSLSLFPLYLSLSIISFSLLSDSHSLPSHSSLSLSSLTLSLPPALDLDQNTATLEEQERQRTLVFIGLPESNAIRPSERVQEDREAITKILDHLEVEAQPTAVFRLGRYDPQRTTPRPLKVVMPTPTHQHVALGGWKRERVRLRSQQNLNRLFVRPALSKEQLKEEYEARLRKRQQNPAPMAPATQLPQTNAPTP

SEQ ID NO: 162786 - protein, 89 aa, Heterodera glycines
SEEHRQLRRVAFFSIVISTAAVIASIVTLPMLYSYVASFQSHLVQETDFCKTRSRDMWTEMSILHQDQGGAHGVGKRQYGTASGRPPAG

SEQ ID NO: 162787 - protein, 188 aa, Heterodera glycines
MQKIYERPEKYNGGGRVATIPFSNGALPTNHSLYSLPGRYPKGLCGLANLGNTCFMNSALQCLSNIPELATFFINGEYSEQINTQNPLGTQGKLAQEFAELLKNMWSGRYCTFRPFRLKCVVGMFATRFNGFAQQDSHEFIAFLLDGLHEDLNRRINHRQISNNRMDETEKREDNEEEGQCAEDGKSE

SEQ ID NO: 162788 - protein, 210 aa, Heterodera glycines
MASADQKNTSSATASSAAFASDPPKMGAETIAKPTAPPQKMNTHFLNSSTTPQQTHHRNNSKQPPQPQQQPQTARRNSAARRHTTPDMAASAAYGMVLCGSDEMEQRYRGRIEKVKFGVPVNEAFCPDIPATLLVLLLKVNKEGPLKKDIWRAPGNQAQVRKLSHIMQHGRLVNISNISVYTAASVIKRFLAKLPGGIFGVENERQLFEV

SEQ ID NO: 162789 - protein, 200 aa, Heterodera glycines
GDQSAHQLLEILDQTAVIGPKNGTLAETVRTLKPVVLSSKVKAALIIAGRDSLLRGETVEMMMEQYEMIANLCRRFAHVKFFWTCPPYVHDKHDEYEELVARLGPMMSLNPFIPVWVTKKGRSIHELFRFGNSFDNMRVTSDGLMKDAGVRALKAWLFTQSDFSGDQKLKIRTIRSAVHVAASVGLGDHRQPSTSSSGSI

SEQ ID NO: 162790 - protein, 195 aa, Heterodera glycines
MPKFPVPFLANSLKISSPVCADVTPTEKKATTIREVRTQKQQIKKEEKSEAQIAQEKERERVKREKEREKRRTKLSDAFSALRSSIPTLDYKTPFSDKMDCVKRLLPFGLYSETELSDDFLQKFDGEMQRHSEFLCERMDSLKERFQSIFLTESLCEMKEQRNLLLRLDVEFEKAQLQKATEAKGASFPFPINSS

SEQ ID NO: 162791 - protein, 219 aa, Heterodera glycines
NLTSFENASFFSMFKIVLLYHIYSAFIYCKPLKNNCDGIHHYNFLLLLFAVLGYIPYNSLINAFFKFWVLICQIFDYLLCILFLWAEMSWLPNENLLDVFAFLSDVRLLRSVSFVCHRFWRLSELALFKFHPMVAKSVRIGWDPKNASHYFFVQSVKCAVALSNLALSVGPSDNSSSNWPPSLPPPNIVGIRRIRMEGHQFNSVELFKICKHFLVAFFV

SEQ ID NO: 162792 - protein, 209 aa, Heterodera glycines
QLSNLFDSFTAFADNYAQVLRERWHLGECGEDILILIVQTPPQMQPTDGPQSSAHSQPNGPFPMLFLSLGPLITSRLHPDFAGHALRHILFDANAQLQHDARPLFKVLNEMLLRMDAEVFGALAPAEFSAGVGTAPSSFVSTPHARHRHSYADGPTVPSRSHIPPWAWSRNLEFNLAIHYGRNSGASRIKARFLSSERCDWPKPRKFEN

SEQ ID NO: 162793 - protein, 80 aa, Heterodera glycines
IFKISRLVPVPNKNRGPGPGFSGPGKSRSRFCPKFPVPLHSSKNLRILSLLMIQLQFANLLNVFAIVNVRALYCAFGSHL

SEQ ID NO: 162794 - protein, 74 aa, Heterodera glycines
MRIETNLGHDLKGHAETGSGKSAAFLLPIIDAVMKLKKGGHYKSRRCCPFALIVEPTRELTVQVYDQARKLAEG

SEQ ID NO: 162795 - protein, 80 aa, Heterodera glycines
MPTVSQSSRHGSGNKERDKRKRGMCHKRKQKKRIPLLIWMTLILIEWREERKNQSEKIKIESSRISFNNLLNLSKFCSFF

SEQ ID NO: 162796 - protein, 327 aa, Heterodera glycines
YNESQANWTHKHYTDLSSPIVHYPSSTNSPSISPFLPQFRSLSSAPNRPQQLSSSSSASSDSSLTSSTASSTLNSTNNTTESEEPFHGQSRKGTSQEESRNETHASRLDDSILNRLLHIEPPNGNKQKSLNNTCHTFVTNSRNESPSDFRWIETADGLGENNGRKSCDHNIGKELDKLRDDFHSLQFLHAQNGRQTKDRLETLENRMTELNVKLRRLDIQTETNVGEQKAQMTSLMVKNGRLCEKLGEHQMGLKAVQNRIELLEQCHLREFVAGLPPVHEDGSLVLSQFENGNYFAEMKILFQSGSRFCSGFAIKSSAHFRNYPSNL

SEQ ID NO: 162797 - protein, 92 aa, Heterodera glycines
ANLSRDFPSPDFSFVETVFLPITAQINENHPPIVLSFFLFSHNPISDSAPSSGFIECACLSHFLLSVPPPQKGASAVVVLPKPSAGQSICDH

SEQ ID NO: 162798 - protein, 144 aa, Heterodera glycines
MISPCSSSSIHWPLNWRPFALFVVLFGFFTANSQMFVSASDDKRNSFGRDFLPFGKRIANSEENFQRDFMAFGKRSPNEAFQREFMAFGKRGAPSDHFQRDFMAFGKRVPDGFQREFMTFGKRSSDIGRGGSFDREFMAFGRRK

SEQ ID NO: 162799 - protein, 96 aa, Heterodera glycines
HFVRSLMDFENVGTSVAAPFLAPLSGIVVTFTGLSKEKRQELIGLLHEMGAQSMAAMNCKVTHLIAERCDPESEKYKATFPETNGAVLSCLATTAI

SEQ ID NO: 162800 - protein, 317 aa, Heterodera glycines
MPSSDFPMPYTSRLSEPCLAPGQSLVFQGSVDSDARHFELSLISGVPNSGQERIALQICFHFEVGITILNSMLENGEWGEEEFHSNPFFHGKPFDVRIRVHEKRFDFFVNQVPWAVFEHRTDFRKIDHIQASGDVSLSAVHWGGRYFEMPYEMTFHDHALESGQRLFVYGIPRGDFAVSLISDSLEELFRMSALFDKQIVVRNAQTDKEWGAEESEGGPFPFRKGEGFDLVILNEPLALQISINGTPFCSFFHRTIDAHKDYKKVRISGEVELTGMEVSLCWESVGGVSNCCKYPEGRAQRTNAAGENVQQPIGLSR

SEQ ID NO: 162801 - protein, 182 aa, Heterodera glycines
FSVICRTMCQKFVAMPSFVHHHLTLLCLFLGALCAFGAVPSLCQLLGAPGGCSPIAVLSAAQQPNGGGAAAQFQQPFGPAFGCPLNPLGAFGRPFPPPPPPPPPGIGGQFPSMQGQTVNLSPNFMGGGQQQQQNGGECLRHNGRRRQLQLWHVLSAAAGDERQQQQQQFYWHANSQRIYRLQ

SEQ ID NO: 162802 - protein, 254 aa, Heterodera glycines
MFDQQQNLTLPGPSSVYLPPNDSEMFGRGQNESAIVSVVCEEHYDYYQPTEKWLLGVVALPFILCGLCANGMSVAIFSHRQMRQQSVNWYLLVLGFSDLIVLLGAFFVLTLPRLSEILHWWRGTAISYYSTPLMYSLMTMAQTTSVWMTVAMSLHRFVGVCFPYQSGTVLATRNVKSLIVGILFVAIFFNGCRFFEVSFQVCRMKPINVELPVLRMTALRQNELYRKVFYEWAYTLIMFAIPFTILIVVNSMVI

SEQ ID NO: 162803 - protein, 302 aa, Heterodera glycines
MDAEKSALNETVPTESTANLTTMEQTVPKVKEVKPRRSLLAQASQQRPPLPRASAQSSASAPTQVALPRSHSRSRITPSARPVLSSRENTSIALKGTAPMSGMTRRSMTTKSQSVEHVAVAQKHLSGIGRNIANGRTKESKSANASDRQRKEVEDELNRTKQMLKQTTKTLDVFAVVASHFDRKLDNANTESAVLMAQKGDEAAQHQRAIAELDCNWKKRLQRAKEDHRVEFDELRAKISSEQAENITKIQLQHQKTVNELEKHVQKLGKKLAEQEEKHRRELAESASQSTNRLHKELESRN

SEQ ID NO: 162804 - protein, 163 aa, Heterodera glycines; identical to SEQ ID NO: 160991

SEQ ID NO: 162805 - protein, 64 aa, Heterodera glycines
PIPSFMRHQLHFFLVLPNCLKCIPKNALKMIKPVFSRISCQYFPIRNDTVNSFASLIHSCFASD

SEQ ID NO: 162806 - protein, 195 aa, Heterodera glycines
MGLFRVLIYGIILGVYASALFYDVRFMPRLGVVWWVEKLVMLSMLNLSLQSFYALLCFVCALFDWNEEFVHGEQHKKVKATHVPSYWRRSRLHRICDFVYATAAFPVGMASSLMFWALYVADPELVMPAWVAKLVPDWLNHVSHTAPVAFVLVDTLLTCHHAPDRKIGSTVVVALFLFYVGIIISVRLISGHWLY

SEQ ID NO: 162807 - protein, 162 aa, Heterodera glycines
SQPFFPCIHSIFWTRNSVFRKLTSRPWSTNLPFPQQTFLTQQNLGLALHCSTLIKTNEFCLGLTCPVPTEYTREPKNKTFFVCPFWRIENVQSPRSPFTNTAPPPQSQISRINQFHSRLVSQINNSLPTPRLRGRRTGRGSGEMSNKYPNPTPAPPSLFNVI

SEQ ID NO: 162808 - protein, 378 aa, Heterodera glycines
SVLRLYPTDEVEYGEQTKTEPLSATMFEALSRHFLGIDFRERNAGHRIDEHMRDEGFNVKAYIDGHSGLIFGGNRWNCGTWMDKMGSSERAGNRGEPATPRDGAAVELQGLALCVARGLDRLCRDRAFPYNGMKGESSSFLSWSDWAAKIQHSFEQHFFVDHNCQSEFVHRRPIVKDSFGASLAFADFQLRPNFCIALNASPDILPPEKAWAALEIAGEVLAKNAPYGICTLDPKDWAYNGNYDNDDDGTNRISAKGWNYHQGPEWLWVAACYMSAKLKVASLLLHKSGDSSAWLSAVGEIRQRLFALEQCLNRSDWASLPELTNRAGAFCAHSCPAQAWSVGCVMETLDTLEAMEKEGMNLEGRKSDRRANDKQKKH

SEQ ID NO: 162809 - protein, 339 aa, Heterodera glycines
HSHFLEFTTFILATGAIPRATLQSSVPVVGPSVTCQARRLYVGNIPFGSNEDAMLDFFNQQMHLCGLAQAPGNPVIACQINLDKNFAFIEFRSIDETTAGMAFDGINFMGQQLKIRRPRDYVAPTTNYELLGRMPVSNIVVDSPFKLYIGGLPNHLNSEQVKELLSAFGQLKAFNLVMDTTTGMSKGYAFCEYLDQSLTDQAVVGLNGMQLGDSRLLVQLAAAGARQSVTHPSTAVQIAGIDLSRGAGPPTEVLCLMNMVTEEELQQDEVYEDITEDIRVECNKFGNVVSMEIPRPGYDERGVGKVFVEFQSKEECQKAQAALTGRKFDSRVVVTSYFD

SEQ ID NO: 162810 - protein, 311 aa, Heterodera glycines
MSAAFERFFVACDIPATMVPKYASRFVKERIHPALMKDLGKDDLRELGVTALGDQLAIMRYIKQCEGNPPEFNSVEQSKRKSESRGRETADFESDEDEPMLVDSNSSSSFKAPDREDIYHIKMPIGTLPKTRKILEKNRSLRDRGVLKRGVSGVRRSGIELNKPLNTISTRSKVIGRKAITLQDTDITSSTAFVPLGSMRSDSISTKTTVVADNTGNSRPVSLANRFASLSGAAPNILFQLGKVVSPSVQLIPSRRPLVRYSSDIDDFSTTAEPFSELTTEMVRKVRKNNSVTFQPPAFRAPIAERIQIGG

SEQ ID NO: 162811 - protein, 196 aa, Heterodera glycines
MPMLNASFDKFNISNSDKIRTQRLISMSESCEEWKTCTKRETYALLDQELNKLLTTSPPEKMEYWKNLLDGFMDLFARFLRAKTTVEWSKIEPLPEGAITPYSKLEQTPRDRVRELLNGLVVVKLNGGLGTSMGCKGPKSIISVRNELTFLDLTLQQIQSLNREFEVNVPLGLMNSFQHRPTTLRSCLKTDPTCLR

SEQ ID NO: 162812 - protein, 291 aa, Heterodera glycines
NVKKAEMRLGQLNKTLSKKRSELQQTSRHSLSQNDTKRELEVGIEQLEQKLRALYFDPQLDHQLEQERVQLARERGQCAQELDRFEARNFKLRFDYTMPYNGFDRNKVKGVVAKLFKMNEQRYATALEVVAGGRLFHVVIDKVKTGEDLLKAGLPRRGTMLPLDKISANVLDQRLIGQAKRMVGEENVFFPGELIEYEREIELAILSVFGNCLICGDMDQAKQLTFDRAINCRTVTLSGEDFKPTGVLTGGFRKPDASILTALNEISGQYERIRELDHRIGAIERELARLR

SEQ ID NO: 162813 - protein, 229 aa, Heterodera glycines
MSLSSAVVRIAFSNVRHPTTTGSRFRCRAARRALSASAPKSAASSASSLCRCCSAPAASSSSRFKCIEWAAPSALPSRHSPPSPINLPAKRGICCCCWWRTSSSIIITSSCASLLTRPAPKSETMRVTAAPKSGIEMGSSSSSRSFSSSSVIVGCRPSKADIAGVVELFSVRKFIVSAAVAAPPSVLSNSAKTPGPIDGGTETGRCRCCSCCCCLVLLTEVCRKRTESE

SEQ ID NO: 162814 - protein, 84 aa, Heterodera glycines
FLKNGIFNFIKKIMNPCTIGSIFHMFFKMLTIRQNIANFFTANHFLNLIFHLNKNYYHELTTKHSPLVHIDRNFWMINELTKKG

SEQ ID NO: 162815 - protein, 48 aa, Heterodera glycines
  unsure (1)..(48): unsure at all Xaa locations
YQECLIYLTLTKVMXQFLVEICRGVLKLAIFRSFVQDLVFMNFLSDWR

SEQ ID NO: 162816 - protein, 137 aa, Heterodera glycines
  unsure (1)..(137): unsure at all Xaa locations
FVQSKLASPPTPTGKGQRRGKTGRKANQTSNTQSVHRTASTDPTTSFLTAAIILCILRAGITAAAGTRLALSXYSLKGLNCTHSDDRPHKRSXLVISRHYLLALRVVAISQAPSPESNPYPPLPVITMVVRYTTIES

SEQ ID NO: 162817 - protein, 163 aa, Heterodera glycines
KTAMDDSVGFLSIINLAFGWSSTPYDSKISLFRSFTVILSTAPFRLLLLKISSNLLYNFFYFRMLNSCKFPKIILQVCGRGIQKLIWMLKLKHRVEHFGRRPNGKETPSRTFVRNCSLCSKRTCPREHLPLVPCFMQINATSCFIMAENLGFSMILDVSAFFF

SEQ ID NO: 162818 - protein, 225 aa, Heterodera glycines
GTCANFLFGIGASKTTAPMTPTTTALTTSAGSPFAFGSSASTTASPGATTTTASATLPLLFGTQQKTTAPAAVPSSVPAFSFGTAKFPSFGSSAAGGTLFGSTTANTLTTSSQPHVNGGSRKRSAAQSVDDISPYGKRTASSSLTETSSIANAPLFGGALTMTTKPNTAIDAPFLANSTAFSSTTITATAIPSDAGTGANFLFGIGASKTTATMTPTTTALTTSA

SEQ ID NO: 162819 - protein, 221 aa, Heterodera glycines
EKPDLNNVDYAGLRSDNSEVRRKQLDNIAVAALEFQPKGNTLETTEVKTEVPFLIRGDLREYQLVGLDWLVTLYEKNLNGILADEMGLGKTIQTIALLAHLACDRAVWGPHLIIVPTSVILNWEMELKKWCPALKVLTYFGTAKERAEKRKGWSKSNAFHVCITSYKLATQDIRAFKKKAWQYLILDEAQNIKNFKSQRWQTLLRIQSRRRLLLTGTPLQN

SEQ ID NO: 162820 - protein, 74 aa, Heterodera glycines; identical to SEQ ID NO: 127609

SEQ ID NO: 162821 - protein, 203 aa, Heterodera glycines
MGSTDQTKALFSTLIQRPTLTDQLLQRPPFKFIHDIVHETLRVTGFLDGLFTSDELDSTKAGSSRDNKMAFLQKLIDALNMDGHLDDVKPAKIVAGKEAEMTNLLLQSFASEATMYAKQDNNKQQQGDVAVKKSASHSSASSKSKSTTVEAASSSPSASKSKNDDDEKRKSKKESSSRRDKEKKEEEHRRSSLTKHRSKDKGS

SEQ ID NO: 162822 - protein, 124 aa, Heterodera glycines
KKIIAKLEERIRALEQELDGEQRRHQETDKNYRKAERRVKELDFQVEEDKKNTERLTDLIDKLQGKLKVYKRQVDEAEEVAATNLGKYRQLQAQLDEAEERADMAENSLSKLRAKNRSSASIAP

SEQ ID NO: 162823 - protein, 280 aa, Heterodera glycines
LAGKTLIGFFLPQMIILFFSPFVLHKFCVFRWNSKGTHWRREIIPKSERELPTRDNGSIVDYNKFELWRREYEEGVAQLEQEHVKKLKELEESFFKELDEQNRSLDSEVNALDIAIPPLGNGEESLANCATQLGQCQHHPNPLSANHGITTAISGKKFLRSRQNDVIPSSSVGAESALHLGAIGLTDAAGTAKRRTQTKKSGSPFGFLGFGRTESAVGGFAGAIGGGPTIGGTSTSSLMLPYLLSESAISEDVHSLGSDSANHCHLAERSSAGCGGLSQD

SEQ ID NO: 162824 - protein, 254 aa, Heterodera glycines
QMQQNQQHQQGNTMEDGNDNTVVVVMGQQGGTTVDWDSREEQQQHLDMETARTSRTEDIIHYPSMDTLIDQILLADSSEEMRRNDDDDDDEFKQYTNRTSAAAADGSADEWTTARNGNSDRCELEAVVSCHPSPCSSSSASSSTSGCSPTRNIPPTATVFSATVPLPPAVLPFGAATAPSTFPPAVFFTGAASDLFMSSQDYAHECGTAAAAGGGSDSAVAARRQTALAVPAWPRPLGALPALTQSLFDAFVVT

SEQ ID NO: 162825 - protein, 355 aa, Heterodera glycines
MGHFFPGTVSFPIPLYMLGSARCWWHFGAKQPRVFASSHAQLTPPEGIESADLRMPGVSPQMNESYLCSAFPLDSERDHFIVGFEPVLSSRHIHHVIVYGCEMPGSEDKAWDCGEMASPRGSYSHSPVCASQPDIVYAWAHNAPELLLPDGVAFRVGGSSAVQFLVLQVHYMRAEEDDTSGIRIIHTDRPQPRQAATLLLATDGRIGPKRKEQLEVACVVDESVVLHPFAFRVHTHRHGRKVGGWAVREEPKSGTDKWTLLGQRDPQLPQMLQLVANQSVTITQGDVLAARCSMENEEKREIKIGPTGEDEMCNFYLMYWTKNGQTLEQNMCFSPGPPIYRWTKSAGLNHTPKRK

SEQ ID NO: 162826 - protein, 262 aa, Heterodera glycines
MARGPKKHLKRLAAPKKWMLDKLGGVFAPRPMCGPHKLRESLPLILFLRNRLKYAQSYNEARMICKQRLIKVDGKVRTEMRFPCGIMDVISIEKTNETFRLLYDVKGRFVIHRIQSREGQYKLCKVKKQAVGDKQVPYIVTHDARTIRYPDPHIKADDTVVIDIGTGKVTDYVKFDAGNICMITGGHNIGRVGIVGHRERHPGSFDIVHIKDAAGHSFATRMTNVFIIGKGATPLISLPASKGIRLSIAEERDRRLAQKQKV

SEQ ID NO: 162827 - protein, 317 aa, Heterodera glycines
MSTIGVHEIFKLSQKDHQPPEKRSKLSDGSTQIVPSVATAKNGGDILEALEKSEDTSELNEIDEASVKRICFLLERKQGKNAELRIKYAEEPPKFMESEIELNNAIQEMHVIAAEPQFYDVLVEQGSVQLLLQLLSHENTDIIAAVCNLLQELTDVEILHESEDGAKLLVDELIKGHVVETLVQQPLVKLNEQNQDEADAVYNAMNLLDFHPQANDLCVSQGLFDWLMVRATKRKVFDANKLFASQLFAMLLQSCESARKRLTEKRDGIDMTLRALAVYKRHNPGSPDEHEHMENLFDALCAALMYVPNRQVFLDGE

SEQ ID NO: 162828 - protein, 82 aa, Heterodera glycines
  unsure (1)..(82): unsure at all Xaa locations
TIDVFRPPKSVRLHQLFWEPEDGKIXIESRSATVLQHMVDVRKKLELEVKIDPAIFVVCSGGAFDPTKTTLIAELGQLKLNT

SEQ ID NO: 162829 - protein, 221 aa, Heterodera glycines
NHWPTMGQSQGIPQSPPEGPSQENNGRTAQPNGATDEGIFRVKVSNCPNTSPRNLRQTFQMQHNRRQSRSKSLEPNAALDIRTIGHRKSSRFGTKTELKKRGQNQNLWNPEKAATQIIGQQLQNPHTQPPTIQLQTVSIHLKQFRNQNGKTDLLEDNKKDGITGLSAHQIQILQKIWERSPEVEISDCARNIMAHLLRSNAQMYQFFDLLGLSDREISSSP

SEQ ID NO: 162830 - protein, 75 aa, Heterodera glycines
KSKCLIFKTGIPPIIYLAFNKTVRRDVYIMLVRPLAMVLPCITVPPELSATQNFGSNSRVAGAGTRIVSISLTVQ

SEQ ID NO: 162831 - protein, 389 aa, Heterodera glycines
MFELMLHCLSSAVVDRQQMAVRCLSELVKKMGERILEIVLPLLEDRLRQGGVNDRRGVALALNEIIGNVHREIVENHASSFIGSIRICLSDSDSSVRDAAGQAFAAYHSATSYLAVEQIVAPMLDTYNKTGEPFILDGLCSVMAGPNGRQLFQSLLPKLARSPVNSAALCRLALSTDAMKRNLNKVMEAMLNGDINTSVDEHIQNCIPVLLTLDDEDDMRAMFSLLLKFASKKESAEVASLLLRTYIDECDGMEYSESQLDTLFCGLVGLYNSDNPNVLQNAIESLVALVKQIDPSSYIQLSLLLKRAIKGLANDTRELSSDGCSRGLCVSTGWQPFLAILREALLMGGVEIKEVAANCLSQLIPLSSEAGLRPHVVNMAGPLFRILGD

SEQ ID NO: 162832 - protein, 238 aa, Heterodera glycines
  unsure (1)..(238): unsure at all Xaa locations
MENEDETPKEPPYGAEYAKSNRASCKGCKQLISQGELRMAVRFPSRFFDGMQENWHHFECFWKKARKNDINEASXIRGMEWLKWEDQEKIRARITELKESDDSAYTPKAAVMTIEHAKSGSSKCYKCKNSIAKGDLRVSSKASFYHLECFHSLGIFQKSAEDSNGYNDLNADEQKRLDELFPKATQTPAEEGIKRKNEISETETPTSKRMKSDGENKEQTEALKKQSELLWNTRIALR

SEQ ID NO: 162833 - protein, 226 aa, Heterodera glycines
MLSLLSILPIVLAAFVAPFANAVFSTPSVTLSLNPKEIELLMDTAQNCKNLSDDQQVAAFQVLAEEQGGDLKASIDNVLMKVNVSDDQFKQNIEEAKQKLSSSKAKETADQLEDLFLDGSLPFIDKVKKSVELVQELPEEIRTECEPVLMVINSITRCPFKEQCTPSEEIGGGNIGNVGQGGGGGIGLQQGQNKQGQQQLQQNQQEQPCFHIKLLKVCTISKNQKE

SEQ ID NO: 162834 - protein, 389 aa, Heterodera glycines
  unsure (1)..(389): unsure at all Xaa locations
LAHILEVCAEIVCLSKGCRVGYSSPSTLHDRAVKIKRGTTGDCVELKPTLIACVPAIMDKIFKAVSDEVKEKSPIQRELFRICYERKRNRFEEGYTSLVMNSLAFNKIRNILGGNLRFLLSGGAPLNPETQRFMNICFCCPVVQGYGLTETCGGATLADEHDLSTGSVGPPLRSCEIRLREWTEAGYLPSNSPPQGEVLIHGANVALGYFKNEEKTKEDFVELDGKRWFATGDIGEFREDGSLCIIDRKKDLIKLAHGEYIALGKVETALLTNPNVDNICVYGESHKDYLIALVVPNLKNLQVLAEKNDVNEPSIERIXANKEMPKILQKELHSFVSGKLRREEIPRKVIICAEPWTADSGMLTEALKLKRKNIEKKFEEEIRQLYEEN

SEQ ID NO: 162835 - protein, 200 aa, Heterodera glycines
EEEERMSSSRANKFAVAFLDDEQTDETTEANSETENEENLTNESKQTKAKNEGKNKNRKGTKKQKRTKAEKAKEFGTSEQMPMATKKTMPPNETAQKSNLVDDPLERLLKVDLRSLNPDDELRRLLGRTFGAEQRRRGGQQQQQRRIGAAQLGGSRLTKPRLDWPPPRQIGLQMILDDEKVMSTATSADTLSNEAEMPLL

SEQ ID NO: 162836 - protein, 198 aa, Heterodera glycines
MQMRVEWNEQQRRRLYRIALNFFNKTPDLGVQLLISWGFVRNSPRELALLFMERRGISKQMIGEYLGTLRSQFHTAVLNCFIEQISMYDMEIDIALRQLLKHIRLPLEAQKIDHIIQAFAQHYVACNRNRLCALDTPDSMYILAFAVIMLNTDLHTPSLKDSRRMKLDEFVQNLYRLEEARHMDRGKTINFYNCRYLH

SEQ ID NO: 162837 - protein, 136 aa, Heterodera glycines
DIVADCSDNVATRYLINDACVLSGKPLVYGSALGWEGQFTVYNNGTNCPCFRCIFPDPPSPEHVMSCSEALEIIKIAVSGKSSFAGNLWMFDRFEGISKRISLREKMSNCAICSENPRITELQDYQKFCRSDPSDK

SEQ ID NO: 162838 - protein, 174 aa, Heterodera glycines
  unsure (1)..(174): unsure at all Xaa locations
WHVLPLHPPLLLPSLLLPPPXPPPPPPLPKSSSASSSFSSYSSCSSSSSLAANREFVPKNKGEPKKMPKRHQQRWKRWRTVTSESAFFYRSSSSSLLSLDSATSTTTSSSNSSGIGTSDAETPPLAFEGEQRQQQKPNTSSRSGTSKTQNLGGGPALKWAETEKNSKKWAQTAP

SEQ ID NO: 162839 - protein, 232 aa, Heterodera glycines
  unsure (1)..(232): unsure at all Xaa locations
MSDRKDSVTGGKRIEQELAEDGRPVYIVVLTIFLKGFFFLYDLLVFIPFKLFADPELKKERSREQKAVPIDGNPASPWRHVDTIGTALYTELFEDCPTLGKIWDKAAELHRGHNCMGTRDILEVIQERQSDGKTFQKLALGKYSWMDYEHVDEVIVESASGLHNLGIEQGQKVIIYAENRKGRDDLRHPLASNWALPIVTVYPTLGDEAIAFALXECDAVLAFTSRPLLSKV

SEQ ID NO: 162840 - protein, 309 aa, Heterodera glycines
SAMAATSKLQKSGRKRLRYDSEESSDDDGIGGDGATVAIIPTPSIDLVLQNLATNALAFTAAPEMEENEEQGDAIQLDCSGSSAAEEEHHHHQQQPNGQTVSSGCSSSSRPSTDKEGEQKLRRMQAQARRQRVSKWKISETAQRKKQMQKSKGNKGVGGGGALVYSVRSSSTTANNNSISKKPPNKKKQNVADRTARKNNIGGAGGEEAPAVTKTAKTLAELLQYSNVVAANLENKLTSPTTSKNDGPPTADGFTFTAAAQEECPSSSSSKSIATLITDRFTPNRGTFYRYTPAPVVTPAVVHKLLLNA

SEQ ID NO: 162841 - protein, 181 aa, Heterodera glycines
MKMAIRSFLGPACCSPTGAAVLLLISGLANTVSLASIATGNGARLGIFRPTRSISYDGQQEETEYEVEPGFEKRSMTLGRLSFRPGKRWSFPPSVVRHINFRLLPETGNEQENDLAEIGLRESAMGKRTAALGRVGFRPGKRSMAVGRTGFRPGKRSIATGRVGFRPGKRSNSPGGYYVTL

SEQ ID NO: 162842 - protein, 147 aa, Heterodera glycines
YIRECFRILIMNSLRRTIASFDQLTMIALIFIRSVRSQKTLDDFRRRSRPSFARNSVSSSPRPSDGSPLHQLRPMTPSLAHLADFRHPSSIDQHHNAQHSLGAAFSNFCAKISGGGKLKSGIIMARVSALLLLQALTNTLRRSAPSH

SEQ ID NO: 162843 - protein, 228 aa, Heterodera glycines
KNNNSSKNDATKSDDRNGKQSKTFADFKDFDFDDRLLLAISEMGWERPTPVQSSMIPLALDGKNILARARTGSGKTAAFLLPLIQKSIQLSQNSIIRKSNGPFSLVIAPTKELASQIFALLERLSESLVFIHSLNLAQYAEANDEMLENESLDVLVSTPGRLLAAVKKVPKLLINVAHVVLDEADLLFSYGYRDEIGRLKSALPPHFQTVMTSATLNEDMTELKRTFV

SEQ ID NO: 162844 - protein, 105 aa, Heterodera glycines
LFKLDRLETRRKVIDLTTAFKIINCHTHLDPQKLYTFSKRLRFNCIRLISKHKTNKTENSFINRTIKQWNNLDSKITASSSICSFKNKVIKWVKAPKYNKNIYIA

SEQ ID NO: 162845 - protein, 202 aa, Heterodera glycines; identical to SEQ ID NO: 128937

SEQ ID NO: 162846 - protein, 422 aa, Heterodera glycines
  unsure (1)..(422): unsure at all Xaa locations
MCHIETYIFMDFETTGLFDDGHNNPLTNPNRSNETARERAQRLDNLIKSDGNRFPKITEMAYMSVPRVLFLEGTEQMSARHLSSMSQDGEESIEPVQVVTNVHVRQLNPQLNDKERFKYEELQRKVPSVLLKQSDLTCKCTFAQEWPAIXHLLQTVPKPACLVAHNGLNFDFRILCHELRKSDLFRTHPIPEQVYFLDTLSCFYELEKEYNREIELTMENVDWTLVLSQFQPNSETVVATAEIEETVQQNGTASEGTQNSNGHKSTTVLHRLFDQKCSLTSNANGLPNSHKKINPILRHWSLALPLIMFMRKTHWSPAKRRCIDAKFFESNNRGEWNFNGNHARRLLCGRGNFKLENMFKRFFSIAPQFHRAQSDCEALLQVCLSYGMDFVKFVDRNCSYFPDCFYTSSKKTQTLNSLNTDL

SEQ ID NO: 162847 - protein, 271 aa, Heterodera glycines
MDRSILVPYTSRLMSEISPGQTLNIHGNVNADAHRFEVNLLSNCVEIDAHMGSAPLHFSVRFDEGKVVLNSFAAGEWGKEERHSNPFTKGQPFDLRFRVHEDRIEIFANQKQITEFKHRILYTNVDHIQVRGDVTLSGVHWGGRYFELPFQANFHGTSLKSGQRLFVYGIPKGNFSINLIGANGDTLFHLNPRFSEKKIVRGSQKDGVWGEEEREGAFPLKKEQAADIAVFNEPYSLQIFIHGHHYCAFAHRVEAPNTDYNLVPVEGDHGL

SEQ ID NO: 162848 - protein, 295 aa, Heterodera glycines
SIVDEILLILGKPNAHDQLKGALYVLTNGKEQSLLLRQDWAVLLQLWPALCLVDNSENKQSIIQLTDLARDLIVSNFSSFQIEYYLPDSVMPLAEQLLSDYPGICHKPAWPLPDKQKLGEFREREAEICGRNRENFLALAEKLLTIAKDENLHWRQVDFAETLLSLLLRKDCDLPDGVVLHFFKRLTADTINTRKIAIDFCSSWLKIHRQKAVKEDVVIPDCPPGRGPGAQWPITFGIRSDNKFLLFDAANAPSNADKWDSANFHSKVYPGFYTWPSKFRVYAPPSEQKWANREF

SEQ ID NO: 162849 - protein, 407 aa, Heterodera glycines
VQNEFGRRPLLGYLASLSDELVQQLFESRPCVVAIFRLLPAFAQQSVLQLMFHKSSDWRSWTRSRFHLAMSSAVQLLFRLRILEGNSNGDFQINLDFRMNYVSSLLANPLELSNLKMHHLDEEKARKATKDLMGKSVERWESILCYLALPSEAAEKSVSETTKDLFQFIGLVRGRAKEPEISSIGFQFLLLSRSEQIWAYLIHYMRFIASKGEEVFPVLDFLLRLTLCINGDDALAQPLRLDPNWPEIVQAFVVTLRELGLIFIRKRKDGWFLLTPLMTQLSVAASAEPLEENAGQNGVALRNSPLTNSHATNGTKGGRNGDGFLIVETNYRVYAYTNSTLQLAILSTFTELLYRFQDIAIGVLSRDAVRRAFQTGITARQITQYLSTNIRQPPSARNNSQLSDSSV

SEQ ID NO: 162850 - protein, 211 aa, Heterodera glycines
MTTVGILGGSHQWFPADQPAELICAASVSSLVERVEWKRAGGDALPSDASDEEHRGVLRFDPFKPADHAGEYECNAYRNEEVIATSKVEVHPEGDTRPDLLHVDISPPQVRMVNAGDSIVLDCVVHGRSADEFTYSWSLARGGALIRELGRQSQLLVKSADPSNDYGIYRCEVESEDRETVGQAQAAVSVGFDSENNAVEAKFDGDSQAVL

SEQ ID NO: 162851 - protein, 171 aa, Heterodera glycines
AIHRDYESPFSGYIEMHEHTSAFCFTMVERDMRIFYDSGAGTPMGRYTLVLHGIVQGNYLGNDSGLGLPIFFFWFYWEGRSQTNRNGFFRSRLFLAKVQMLKVMALAWGKELLTSPIEVLLNVFFNRMDRSLTIKNLYVIIITENCLALGRCSIGSLQVSLIFLAELLQKK

SEQ ID NO: 162852 - protein, 291 aa, Heterodera glycines
ELIREPMFGNYYQFDGTFLESDVLEPTSVTALANDSKALLDARAKLWDEKFGNDKCTLQKIKEMGIDSLVKKIFDSSVSEEAMEENETEQKANGNVKLHVEVKRSGIKNKNGAEIYCSDNFPLVIDSSGLLNRFLEDEPIIRHAPDRKFGVWCAPRKYSIDGIQWKIVRIDPESKPKKSVPNGVSKMNGRSKECVSNGGQTDECISSSPSTVPSLPSTTVRNSPKLEEEEEKVDENELFEGLICSQNETHFLVFSPGRRWLGRLDKAKCGKDSASILGMWIQFKIKNKAGM

SEQ ID NO: 162853 - protein, 147 aa, Heterodera glycines
MHSKTALNCLLIWALAFIVVGFVQVTVQQPPNEQQREEDKGIFEKSKDTLSNAAEGTKDWLVGAKDSVADTFSSAKETATDKATETKDKASDYAESAREKASEGYEGAKQGAQERYESAKEYGKEKTEQLKEGGRKVAGEADRKTEI

SEQ ID NO: 162854 - protein, 161 aa, Heterodera glycines
MDGRGQRQRQPIWQWRRVCRACGRIAYVATHQCPRDQPADDGICRRCNGPHTVDEPCYIQPIDDGSVRQRASIAVDNDDSDDDDDDDEELPLRLCFFDAETSQDTPLQLNNRTVQKHVPLLIVAEVICERCLQAGISVSDGLGRRAPGCVCMTGMVRGQLF

SEQ ID NO: 162855 - protein, 141 aa, Heterodera glycines
  unsure (1)..(141): unsure at all Xaa locations
RLTERREVKRESKTEIVKLETKRERESKRKKGREMERKGRLTESEKKXVRKEIRERKRSRRESKRERENAMVKRNREEERERERDLLIVDXEKRESERQSQRERKRGRERERGRKEEREKEKEKGRERAREGETMKEWSDQ

SEQ ID NO: 162856 - protein, 371 aa, Heterodera glycines
KRKYLAGKRGFERPPFELPEFIKRTGIMEMRETMWEKEEHQSLKNKMRERTRPKLGRIDIDYQKLHDAFFKWQTKPQMTKMGELYYEGKELEAQMREKKPGTLSDELRIALGMPVGPNSNKFPPPWLIAMQRYGPPPSYPNLKIQGLNCPIPEGCAFGYHAGGWGKPPVDEYGKPLYGDVFGLTVPQVADDVDESRIERRHWGEIGSDEEESEEESEAEEDDEEGTGAVPPPPPEGGYVTPAPTEGFVTPSGITTVPGVETPSSTIELRKKRTMDESSLSGPETPAPPLYTILAEKKVDRVGTQLMATSHVYDIAAQRKIPVPNEGVEVSLNPEELEDQGGLERKYEEQLRKQAKIRMENEEDFSDMVAEH

SEQ ID NO: 162857 - protein, 220 aa, Heterodera glycines
ESYHIGRMEEEVILDDERGTKAAAFSPHSNGTISFGFQMLAIGAGFCMFIMLLALFAAVQHRKRRRSSGSVGSFRSPLIHKRSYGGHSTGGRLSQAIPPPPAPQYLRCSNQSLRKCSSPGGSDYSLSSSYSSSAASAHSLSPMSPYGHGTVAAGYQQQQQQQQSPFAALNFIPYGAAPPEGIEERHNANHNNKMMMMMNSNERKRHSINTTAAAEAALMG

SEQ ID NO: 162858 - protein, 196 aa, Heterodera glycines
MSSKPILGLCSRVSACGPIQASDFQFAERFLIELAQRDCTNLAKQRPEVRLRTDEQGLIRLETRLGNCAASDDWKNPILLPDQSPITRLIIRDRHEKMRHSGVEATLTSFLEKFWCPKARGTVTREVKKCLRCRRIQGPAFALPAMPSLPTDRVVRSAPFEHVGIDYLGPTMTRIVTGPTTAAHKAWIVLITCLAT

SEQ ID NO: 162859 - protein, 366 aa, Heterodera glycines
MAKRAKSSSPALSLSHCQLYCSLLLFLLSILLSVLITFLLTRNAIRSQIERVNQNEAVTAKLVAPHGAIASLNAGHDITRLRMPGKSLLANARPRGNETADEAKEERPEKRKEPGAEELRLSGELFPIWYNLSLKVFVPGFGPEISPQLNLTFNGDLLLNFAVNRTTRTIELNALKLRFDPNNLMAYELKRTDNLATGDEVDRTPKVIGIRVDEAREKVFFDLDGDLTLGNHYALRIPYSGPIASKLSGLYLTTYTTLSGEHKCAAVTQMEPTDARRMVPSFDEPEFKAIFRLSVTHPKGSRAVSNAKELREQQQTEETEWIRTDFEETLPMSSYLLALVVSDFEFVEGNTSRGHRFRIWARKDDL

SEQ ID NO: 162860 - protein, 282 aa, Heterodera glycines
MGTTASSQLEKELSADHVFSNEHFYGLINFGNTCYANSVIQALYFCKQFREKILAYKQTHKKSGMQRDNLLTCLADLFSNISSQKRRVGTIAPKRFVTKLKRENELFDNFMQQDAHEFFNYLLNAISEVLMEEKKKEQLGGSLRKANSAMAPNKRSFSANAKGQPNDLSAKQLTSTSDITGQQELTWIQEVFQGTLTNETKCLNCETISSKDEDFLDLSVDIEQNVSISHCLRNFSNMETLSGDQKYLCETCGSKHEAQKRMRIRKLPQLLAPHLKRFKYVE

SEQ ID NO: 162861 - protein, 312 aa, Heterodera glycines
  unsure (1)..(312): unsure at all Xaa locations
MEVDKFHSSQTLIGKGTHKFTLWADKYAPNTFLDLLTEDETNRXLWLRLWDEYVFEKRGGKKWEGSHRRISQRNNANATSLWDTLEERDRTLFEMERPKGTDSRMPKQKILALFGPSGVGKTSLARVAAEQAGYRPVIIPISELQNMAELKSRLENATDCTSIDALFHNLSVSAASTGEAPPPHVGTRPCCFIVDAVEQASPEMVQFLCSWVRRSRASSVVCRCPVICTCASLWRAPALRELRANCLPVRVQRCNRQRMQRRLEFAIXEGVRIGRDQLDELFLSHGSDIRLCLNTLQFSTLKTHTSDRIQAN

SEQ ID NO: 162862 - protein, 477 aa, Heterodera glycines
  unsure (1)..(477): unsure at all Xaa locations
MSYDPYLSGTSSNARRLLGAPPSLSRDVITKSFVKMDCSHEASLGTECSGEESEAAKTADETEGELKPSQRDEEEENGTTGKRQQKRRKRRIRLTDIGPKAKKKAERREKPMAEKKNEVQDETNPTETHCQSSKMSPPLLEIENELGQNPPNKVKPSPHFFTPFQLLCDNLIRKFMAKDPEKYFAQPVTELEAPGYHSIVDYPMSFSTINDKIDNNMYLNLDQFKSDICLVSDNAMLYNNTGSVYFLAAQKLKVLAKYYXXEKYLLFLVYSLPFGKALTEEQLGIRLRRKEEQTPRQLKEKSGRERPLPFLSDSQKTEEILNTAPVKIKDRLTGRRPCQIAYLDNREGAFALNVLTETATTKLTLGDHVKPLGKGNPGICAPFEPRICSDYLVSYTNPGPFASFAPHFDLTWATMSKRDSDLLLSCYGDRDNVTDATALRQMDSNVGTPTSDVGESMVNDLTDHEHLGTITSLGNTS

SEQ ID NO: 162863 - protein, 339 aa, Heterodera glycines
MASQKQLREKKCSEVEDKTNDGTEREMTNSTSNFYKLTKTDSQSSVEQNVANLERNLSSNLVVPSTSGRCANRRDEEETSNPKNAQLSEQTKCTPEQHEEKTDECPPKESNVRLTNKICKRRMNKVENVAHLNGRGGIGALGWQATLPSARERLTFMLMNDTLADIFFIFRGSDGSVQRIPAHKFVLSGGSAVFEAMFRFGDSSDCANCILELELVDVEREAFEALLTFLYTDDIQSITKESVMSILYTAKKYAVPTLESACVNFLENCLNGDNAFMLLSKARFYDEQRLANQCLEIIDEETQEAMKSDDFLSIDHETLCVVLGRDTLRVKELTLFKAS

SEQ ID NO: 162864 - protein, 221 aa, Heterodera glycines
EIADEEEGICTDTVQQNPLHCLRCFSPIKCPVRLPCQHYFCRLCIADEKCCVICGHPIGCSELVEDKVLNYVLESSSEVTETCANCDQISQPMFFCDTCHQPLCSGCRETTHKAKIFSTHHIFELEERGRLRSRPICPQHNEPFILFCLDSKSLMCIECFNSSSLERRGHFVNIELAHKICCDKLEKNALNLRIFQEELREQIELRKRLTDELSKNSENLR

SEQ ID NO: 162865 - protein, 487 aa, Heterodera glycines
MADEASEYTDEEYTYEYEDEEEPEANENAAPAPVEELPKDEPKKAGEDAAAKKKETSPPKSLKKEGSPPKSPKKEASPKKEASPKKEASPDKSPVGKRKGRTPRQSMEEKPKVEKAKAKTEEKPIEEGEAADGLAPPAVDRTETKSPEPGYQPMTKSVQKKMALYAGGKPSKHDKAKLMKSEGIIPIQAGTNKYASQRGMTGFGRPRDVVDKVKSENLAEITDEEKLASLKGSTWLQSGTNKFASQKGMTGIGTPRDVNYRTKGTGGAGEVPEDKARLTDGIVPLQSGTNKLASQAGMTGMGMPRIIDVRKTVDQDRESQGFIHLQMGTNRFASQQGMTMFGMPRREVTQYKDEVRGQMPHDEGTISRQTTGWKEGASQQGMTGFGAFRNNTQVQLQAQDQRSQGMIPYQMGVNFLDSQAGKTAFGMPRRTYTPYVDDSHEELPADITRRPEVPFWTGMEVDFANQQGMLAFGTPRDVRGEYVRRMW

SEQ ID NO: 162866 - protein, 146 aa, Heterodera glycines
FVCGNSLVCETPDHARQLAYGTDGRSERFRAVALDGTQFQPNGVISGGGADLKAKAKKWDENAIRKLKDRRTALQEELQKLHRTGKRELDVEMKREQITSLEARLRFTQQELKKSENETLRRLEQDAEVESAEPETIEVIKAELTI

SEQ ID NO: 162867 - protein, 60 aa, Heterodera glycines
FLTFNLKKKKSSRVERDRDRGGKSRVFQVPVPIPVFGKTEIPVPGFFAVPVEKLCPGPDF

SEQ ID NO: 162868 - protein, 311 aa, Heterodera glycines
MPPKPIPTKAANVEQSQQQENMHLSFSDDIDLDAIRKDFERLNPLPSAANESEVFARLRSTAFRLHTQNAFWCQFDLSEETKAKMEQCRMGNNPMAFVKRCIVLQELKKSTEAMEQNNEQMPSQIQLDFHVFTLPYVLPHYACLSLFDGEIHHGAIATSKQRAKISCAAVLCEVLVKMGWADVKRAKKRKNSDGEKALKKKKRKGENGQTEDVEEGNVRLSHQFLLTLHPNESLDPTTHFFLASSAKSPIQLLKEVADRESFEVSYTKGMDEYFNKHIVHVNTIEGTAEGRSEVSISEAKCSAARKGIDAL

SEQ ID NO: 162869 - protein, 142 aa, Heterodera glycines
SDRRTERNALPRHLFELFRGTVNGKCQFVENVSVRSCRADPSISPTVRHFAKPFHRRFGPLHYNRRFGTLGDQQLARQKGRTPAEWGRRARDSSAHRSLGGRVGDDGTGNGIPFSLDNPVPFHRFLPMVGTKTVNWSDWTSR

SEQ ID NO: 162870 - protein, 157 aa, Heterodera glycines
WQIGCCWCFFSAFPIAFHFSLPPFLFLGSVQMFTDLSSPKKTMQRHLFEVIVKFLSDGFELNQIDDAEPNISDFHPIPDNLQLSNQPKMCLQESEIEQTFTGDIIKLFGTSLSSISLEHWPEAIRAENELICTFARRERFWTLAKHFCAVSDRRREK

SEQ ID NO: 162871 - protein, 511 aa, Heterodera glycines
MDEAKNMALLFFVDHLMQKGGQRTIHDLSCQFGARGFTDEMRQAVGTTQEGLYEFLSQYPSLFTLQDGDKVQLKGYGDGDEGRTHLSHIPPSGRQRDYVAEAVQFFVAKLEKFGPEMQVKSLLGHRSQAAPEVRLVHGRHLKEFADFLANQTNHFTVEGDRVKLKHMPEPNGTDAKQFLDEEGRPLVGHRAKLAAVDFMRGVLEQNEEMPIPLDIFYRRFCDRFPHSIRQEVATNPKELLLFLKLNRHVFFIRSNKVQLVRNRPGDEHGSESGRSTGEDGGSSDRSATSPAENGGGCAPPRAPTDGMSPETNALFPLNRDNLHRVQIVQTLQQAQEAVRCLRVDLDSVPSSAFLALDFKLLSFGSVPSADLPLVVLAVVASPLRLVVFDLAQSDKVLSESGLRTLLEDDSVLKVTHDVQRIAPLLANRWDIRIGRLFDTQIAHSVIQHDKFSKPLGDLRAISFVNLQRVYFPQSLVLSDVPPRKLSQTPNWSDRPLSTDLLLAACEECHCL

SEQ ID NO: 162872 - protein, 212 aa, Heterodera glycines
MVKVEKQISSGTSDDPLSLVDSIIKDHFLNDLKHKQLTPVQACTLRHMLANFDCVVQSPTGTGKTLAFMLPTLQILVQKKLTGAGEGKEQPTSVSDSCRILALVVAPGRDLIVQLFHLFSPLCKKLGLSTLKLHGAGGKQKKKSPKKHMKGKCILICTPGSFEHFLEKEAELKQYLKHLEVLIIDEADRYSDRESMSSLTTLLAALPKQRRT

SEQ ID NO: 162873 - protein, 233 aa, Heterodera glycines
KQRSDSLLLPNDPNSYLAVLNQVTWSDFIERIVPTGTVSNVHLKVSRGPERRISKKALVTVMPGARWPDGKMLPRMFFVNVPDIGRVEQEIRKAEVDAGLAPEHWSNIQWMQPGPMSLIIPSLVIFALFVLPLVFLGRMMTGSKMGNFSESISSMMGHRLRIYDPALKDGKLKIKFRDVAGLHEAKVEISEFVDYLRRPNKYTRLGARLPKGALLTGPPGCGKTLLAKALGAE

SEQ ID NO: 162874 - protein, 208 aa, Heterodera glycines
MPNIRQQKKHEMVDSDDERNEYGSTKAEPSPLTDQSATSMMTHNSSNAAEGGHIISSNGGAQICGGNGTVPMPLISCWSPCSASSAGDPLLWYETDKCQYCNQKCRKPRRLLDCLHYVCEECVPEQCLLLDNLEPDEIRCPNCSQVEMSSISGQSTESSRVEICIKHKEKFTRVCLSCARLLCVNCEQQLSLPTAQVNNITNVVAVPQ

SEQ ID NO: 162875 - protein, 209 aa, Heterodera glycines
MAEARNIAALSFTVTHDGISVSYDQEVLRDIWHAFSRSYKKRIAKFENDFFAGIFPANIRSLAIVIFLVAALNVSFGNDKTPFNLADKLNYYVFSNITTLDVLSRTLSIAFAGCILWFLLVQFFRLLLKWFLMYKGWMYEAPHSGQISQTTKLWFYVLHKIAAYEPMTHSFQGALPHLPLPSLASTMERHLRSMRPILSDRDYDELVEL

SEQ ID NO: 162876 - protein, 198 aa, Heterodera glycines
MGMGGGWEVTIRADKLVCFHGKGNFLSQLFPLSLVVDGNEYGSLEHYYQACKLFSLVSAQAAQELRSIKDPLKTKTRTRDLLFSMGVSKARIDAWKNSHGVQVILHAMRHKFSDQHQELCDQLLATEDALLVQAYDKDSFFAAGMVEKRVREWAKENEGKVLKFPSELSDETFKHIPLVGISMEGISLHSLRHFRFDL

SEQ ID NO: 162877 - protein, 117 aa, Heterodera glycines
FFFFTAKLVPTVAFSCLALSNNLTIFETQTKKILDQKWLSLFSHFLPQNWYQQLPSLVWPYQTILRYLKRKQKKFLTKNGYLFFLIFLPQTWYQQLPSLVWPYQTILRYLKRKQKIS

SEQ ID NO: 162878 - protein, 264 aa, Heterodera glycines
MRSEHSLYKLNLGRCANNFFLHKISSLGDCSLLHTSPVRENGHTKLTVNGFHCPPKETKNWEEKKDKTSQEKEDGEKGKANGQRKKEQIEPKAWEEEEEFEKCHSLVAFSVYFTWFVLTVHAYFREFLRRYGIESNKAAVERTELRGFAPLVDSFEAIYARNCYMRVRDVFERPIGGVPGAKVKLVDRQTDDFCWTFKFPGSQTEVINVSSYNYLGFAQSDGPCAEMAAKAVEKGGLSTCGSALEGGQCSIQSDLEKLVAKFLG

SEQ ID NO: 162879 - protein, 208 aa, Heterodera glycines
QPICLPNIRLFLVQLLRGLAYCHAKRILHRDLKPQNLLISKNGELKLADFGLARAQSVPTKSYTAEVVTLWYRPPDVLLGSTDYSTHIDMWGVGCILFEMLARKPMFPGNKVEDQLDLIYRKLGTPTPQLHPRLCALPAFNCHPRHLRRHSPRALVCLASRITHERADLLQRLLAYEDKNRLSAVEAMRHPFLKCFPEAIFGLPDTES

SEQ ID NO: 162880 - protein, 100 aa, Heterodera glycines
RGKYFQKAKGRKACRIASPTMPIPTAAPVSFCTWNDHSNSVFVSRGGSLNVSCPWPGLYEPSQFSAFLYELGERFNRRLLGHALIIFYQLFAPTNKRFIM

SEQ ID NO: 162881 - protein, 260 aa, Heterodera glycines
MSSLSEEVKKVKQAANIPPPAVCNRFVEGFSSEDVFETRPSSHGGAFAFRYDVEMVQLTRNKSLTSGGGDDGKNGLLRGVCFELIKFVHDSTQGFGQAAQFVYDNRKILFTNKRIEQFVLEIDTEKVQGIVRDFLRGSSVKIEIKPCQTDKHELDLNDVFSSISRRPDEQSDRSLRTFLEMLTSQPFLNAGTHDIIGAGRLFKRQICKELEDGIVTREGIAKGVRVIDNNGEPKAALVADVKTCAFFASRNLEEIVMEMV

SEQ ID NO: 162882 - protein, 213 aa, Heterodera glycines
MPFSAFFSAFSLWCPSVLCSAQFGFALLLPLSYLLYRLTRTSLALFQAIFVYRLAPFVYAPKLSTFRHRWTVVTGGTDGIGKAYTFELARRGLRKFMLIGRNEQKLERVKEEIESEFPGSSVLLFQFDFFDAVNAEDADRLRRELAKLDIGIAVNSVGVGRELMERFGERPEADRQLFRVNAIGAAEFISAVLPLMERCGGGHLVVLSSSQGF

SEQ ID NO: 162883 - protein, 195 aa, Heterodera glycines
MFGGGGDPFRNPFDQMHQQMRQMDNMMNSMLGDAWDMLNGFGMMGPPFPNHPMLTDGLNRQNQALRRQQPPQHHFGPDTMMSPFGGFGLFGGMMQQMQNMHNHAISDPNSVVFSESTMVSYDGNGQPKVVQHSTRKAGDVKETRNALRDGVREEMTVGHSIGDRSHVIEKKRDKDGKVRQQQKFFNLAEDEAEDF

SEQ ID NO: 162884 - protein, 195 aa, Heterodera glycines
MSASNSRKAFVPFSNALRRRKLLFGFGVGTVIGAGFYYMDKNNERRFKRDKDVYFVSNAHAATVDTKAALNKRPSGSLPTRAELLKGMRDEEFDILVIGGGATGAGVALDAQTRGLKTALVELDDFSSGTSSRSTKLIHGGVRYLQAAIMKFDREQYKMVKEALFERANLLEIAPHLSYPLPNMLPIYKLWQGPY

SEQ ID NO: 162885 - protein, 168 aa, Heterodera glycines
MPPLGRCEWNVNQRARLIQLVRQFEIIWLPVGATDKSKISACRRAAFEQIRQHFLEDGFTVDDLASQWRNLKDIFYKRLKEMNRRIQMGEVNVKPPWRFFDALSFLAGSKAMDENRREAFGESANEVFADEDGVIEDNLSNFGLMDELNQPSAEEGLLNLVKAVKEEQ

SEQ ID NO: 162886 - protein, 171 aa, Heterodera glycines
MNVQQQQPVTSAYPQQGNFAEEKQLHPNHNVYRKMERLISLMLNVDDGVPIKTVKSFLSKLPRIPSVFTGQDLVGWLLQNVDIADLGDALHLAHLLASHGYVFQIDDHVLTVKNDNTYYRFQTPYFWPSNCWEPENTDYAVYLCKRTMQNNAHLELEDFEAENLAKLQKMF

SEQ ID NO: 162887 - protein, 192 aa, Heterodera glycines
MTFLDHVDKDFFKAWPFGVLKTIHWFAPLAILITLGNSRYIYDSLGFVLFTAWNAFIVSLITWLCYIFRLNRKAFQFGAGYLFVPFALIDFIVSLLAVLCFGISSLICAIALLDSLEYSLGHIISYLLATVFCLISGSAFGYFAILVYRLIPNGQFRHLMTMVIEGHQTTTLDGQGGVGPVNAGPPPGRPPV

SEQ ID NO: 162888 - protein, 246 aa, Heterodera glycines
  unsure (1)..(246): unsure at all Xaa locations
SNGSPIHNKNAVLSVGPHGPMLMQDVVYLDEIAHFDRERIPERVVHAKGAGAHGYFEVTSKDMAEHCKAAMFSEIGKRTPLFIRFSHKGGESGSADTARDPRGFAIKFYTEEGNWXLVANNTPASQXIFFIRDPFLFPNFIHSQKRNPATHLKDPEMMWDFWTLRPESLHQVMFLFSDRGIPDGFRFMNGYGSHTFKLVNKTGEAVYCKFHIKTRQGIKNLSPQKALQLSAEDPDYAIRDLYHAIA

SEQ ID NO: 162889 - protein, 353 aa, Heterodera glycines
MALAKLKTSVFAIFVVLFVSIDKCRCTNILFTFFHDTGSHFQSVFPLMQKLASRGNNVSVLDTVYEQDHSLEIHHFRALLPKHHNDETSKRHFANDIWSRRLSATDLALYFGTCDKELGILMQNHSQKIVQLFDTNWDVIVLDDLFWSFGFAFATLSHRRWHLAPNERKEPHIVAYATAQSGLNSHNSIRATSQFWVGRPTLCPLYPTDSNDVFSPDRFVHRIYALLDIIQEAVAVNIFALHFLMPNIAKFGVPNFSFTEFYSRSQLFLHDSIDRLGLPVTTAADIFGVGAHCKTPKDSSALSAKIKQFLEDPSSKGTIYIAFGSHIDWKFAPRKFLDDFVTVFRKLPQYRFI

SEQ ID NO: 162890 - protein, 250 aa, Heterodera glycines
SDSPPNIDPEKGFQLSAGVGHSKHSSTPNGRVRDVDELAEEVPGESDVSDEEDAESPLPSVHAQMGLFCHTNPEVAPASMWTSKNVQEFKDNIKKEGTEGVLKIGHGETVTVRVPTHPEGNSLVWDFATDYYDLGFGVYFEWTIAETNQVTVQVEESEDELEDDQAAGGEGRTGGQTAGDDVEADAAKRQKDANKPRVDEIIPTFRRDCHEEVFSGSHVYPGQGIYLLKFDNSYSLWRSKTLYYRVFYSK

SEQ ID NO: 162891 - protein, 181 aa, Heterodera glycines
GMQELSNIRLATPPPQPPPVLRNVPLPPVTSNVSEMMVDRNYIAKGVSPPKFKPIGELSDYQQQINGSQEVSNIRFATPPPQPPPVLRNVPLPPVTSNNNEMMVDRTCRNNTAKPSASDFGLAASSSSTSTGEEDDAQLFGRRVVKFLRSLNNGRRRRRACIGIEQVMIEFETEEEEEQKR

SEQ ID NO: 162892 - protein, 157 aa, Heterodera glycines
MQCAYRFNVATLNCWLLPHPWPIGSKHKQFRLQKLIDELKNSRFDVIALQEVWSEKIFLQIAHELNGFFPHSHYFHSGFTGSGTCVISKHPIVSTLLHRYSLNGFPHHVHRGDWFGGKIVGMVEIMVEQYRVAFYTTHLHAEYNRKNHLFLPHRISQ

SEQ ID NO: 162893 - protein, 166 aa, Heterodera glycines
PTELQFLDESVADEEAVLGSEITLHQHKMEKEEETTFEEHDDMTAPKSVFGSSSFGCNKREHCKSDDEDYCHSACEEGPTEETKNHSPPEESSKEKEGEQAEDTGTGMTDIVEAEALTEPGTPLRQMDETTNSQRNEEETCPIREEEQQTKTEENSTEATEEGRRS

SEQ ID NO: 162894 - protein, 197 aa, Heterodera glycines
  unsure (1)..(197): unsure at all Xaa locations
SIPKSAFRFGTFEFLKGHAVDERGNLSPFMRLACGLGAGISEAIFAVTPMETVKVKFIHDQTLEKPRFRGFMHGMGVIMKADGPRGFYQGLTATMAKQGSNQAIRFFVMETLKDWYRDGDPNVPVSKPVVGLFGAIAGAASVYVAFAIVTILFFYFRPFHFRFYFSLPXFSYGNTPIDVVKTRMQGLEASKYKTLST

SEQ ID NO: 162895 - protein, 152 aa, Heterodera glycines
THFQFDFAHFAFVWKCADNCWRNARAKNQQNVSTISDHYRMFLAINSDHYRMFLAIITTAISFAITAFPELVGKVLRFIRAGFDTHYFLDLWPYTLALISIWLYPIVYRAYKFVQQNEEHKNGGPYGQNAKVINQQYAKVVPMPLPNAEMIG

SEQ ID NO: 162896 - protein, 201 aa, Heterodera glycines
MTTEEPISGGQPNTPPIPAIELSYPVSVIYCGECSMPVEYCEYSGKFERCQQWLERNLPDLAEKQMKIGAGDGKAAEEGNGEETEAKKHQKRGGKGLPKASGGGKGSKEQSAAVPRITLKTEVRSKNKAVTVVKGLTTCGVDLKTASKFFANRFACGCSVTVGSADELVIQGDFKDKLFVEIPKKWGVNEEVIEDLDDQKK

SEQ ID NO: 162897 - protein, 283 aa, Heterodera glycines
SPVNSAERLHISLLEYINETFKNEDFYHFLSVQYRSNELIQKWSNKIFYDNKLVTYQLTKNIHLRQIINQQNDLSSGPLSSKQKFLIDGPLVLIDTDKGISDSKWQKVYSLFKLWYPLSFREGQNEHTHSFHNIGEAFCAVLHLHALNLFGGLDLSKIGCITPYSAQAEKIQKLMAMGRDEGPRFEVSSVDAFQGQQREAIVMSLVRNNKMRDIGFLREHRRTNVAITRAKRQFLLIASSRMLNVDRLLRELYGVIRTDGLVGGPDALLPIAHEIWQCHLERK

SEQ ID NO: 162898 - protein, 218 aa, Heterodera glycines
ETHIVLGIGTVCSLLAIIATVVTLPSLYSEMNQLSNKVRDGVEAFRVNTDSAWTDLMDVQVVVAPPSKARDNPFSSIFRAKRQLPGHCHCGPPQRPNCPPGPPGPAGPPGQPGQPGSAGLQGQPGAPGQPAPPCPPQNIPCPLCPAGPPGSPGTQGPPGQQGAPGQPGAPAPGGGQGPPGASGPQGQPGQPGRSGTPGQPGQPGNNAVIYNTIPGPEG

SEQ ID NO: 162899 - protein, 311 aa, Heterodera glycines
MKRKRTSNTSSRPIKQQSVARSSGSFFTPWGQRKSARFLKMGRRIYLCNDVLYDIFADIDIVRLGLGIAPVSAHFDALVDSCFKTKKRKLRRLWIRQAILTMRRSIQRKTDKAELVNYEGKQLPFAKAPPPNGIVGFKSISISYLDADAMAFLEHSRPLFDRVGIVFKCDGAIKGRGKEFVQIWPLFRANIVKMALSQRLLVRLRRLCGPTVLCACANLRFVNVDDENFAMKSPADDAAGASPGQALLKWLYTPREDGQPKVLTMKEKPKKMMDDIAKEFSTATTPVSFIVRFRKSSWDAYDDAALKPFEL

SEQ ID NO: 162900 - protein, 271 aa, Heterodera glycines
MSSEQALKAKQLGNEAYKRKEFATAHKYYDEAIKYEPTNIVFYSNKAAVFFEEGKYDECIEMCGKAVEVGRENRADYALVAKAYARMANSYKMKDDPKKALHFYEKALSEHRDPDIVKKHKELAKEVKEMEQKAYIDPELSDKEKNLGNQLFKKGDYPGAMRHYNEAIKRNPDNAVLYSNRAACFTKLMEFQRAVDDCDLCLKKDPSFVKAYIRKGAALSAMREFGRAQKAYEDALQMDPSNHEAMEGLRTCMQSNEENPERARERGLAGP

SEQ ID NO: 162901 - protein, 616 aa, Heterodera glycines
  unsure (1)..(616): unsure at all Xaa locations
PALPMKKWFDTNYHFIVPELSTDQSFSVGLNKPLNDFLLAKNALNLVTKPVLVGPVTFLHLSRVGERKELATEEQQKVHNLKLLPSLLPHYVKVVQSLVDAGAKWIQIDEPIFALTFAENEAPAYYDAFRQTARALQQVTAKKAHLLFATYFSSIAKNVQIVKDLPEGTGIHIDLVRAPEQLDPVLSALPANCFVSLGLVDGRNVWLSPLRQSXNALRVVQKLAPGRVLVSSSCSLLHVPYSTKTEKRSAEMPKTVATGMASSKIIHWLSFGIEKCEQLVTVAKMINGGDCAKELAENDALLKDHSVSPLIHNGTVKERVTAIEASGVESYFRKSPYEQRIVQQKACLQLPPLPTTTIGSFPQSATVRAMRAKFKAHKMADADYWAFINAETERCIRMQEDIGLDVLVHGEFERNDMVEYFAEHLHGFCVTSNGWVQSYGSRCVKPPVLYGDVQRAGPMTVAMTKFAQSLTKKPVKGMLTGPMTILKWSFVRNDQPQKDTLFQVALALRDDVAELEKEGINCIQMDEPAFREGLPLDPAQHNEYLKITVQAFKISTGCVADSTQIYSHMCYSDFGDIFTHIAELDADVLCIECSRSDLSLLSCFDRFGYPLMVGPG

SEQ ID NO: 162902 - protein, 217 aa, Heterodera glycines
VFQTVLEALEYPQIKAIAIIAEGVPENQTRKLIKVARQKGVTVIGPATVGGIKPGCFKIGNTGGMMDNILASKLYRSGSVAYVSRSGGMSNELNNIISHNTDGVFEGVAIGGDRYPGSTYTDHILRYQDEPKSKMMGLLGEHGGEEEYKIVQALKEKRINKPLISWCIGTCADHITSEVQFGHAGASANAVKETAAHKNAALKSAGAHVPDSFDDFG

SEQ ID NO: 162903 - protein, 206 aa, Heterodera glycines
MSSFPKAVNIKIEHNNSFSDHDYCYKESAVEEMDEENRSFFVDVENDDEYDDEYNARGRKRRSVKQPDFFMINNKANNSNKKTSKARPRKSESKRGKSGEKKVKYEVEYIWGKRTDKLRPDKVEYRVYWKGYPIEKSTWEPEDNLRLCQESIDRYEQREMYFNDKGEKEMHSKGLKKDNTAGNGVKVVVVNGAKPLKQILPTMQAP

SEQ ID NO: 162904 - protein, 274 aa, Heterodera glycines
LIMPCQLPNEIATVTDDVFSYMCNLAMEKCSKKADKKKASCGGAAMRKRLLIKNFVAQMLAQDRHSRELSSPTSDCSSHLNQTFDESFDFPSCQSGANAVDQFGDDMEMDAIGEEVPSNATNDAFLCLDQPSSLLTDLDDVSCDPQQQCHSSRNRKRPWSLVFSADATATADSMPMPSLCSMGVVVDQYNHHHLSNTNNSVVDMFTAATSAQHHHFINSTANNINNNGVLHSSAPPLLSPLCCGMLQMSPFGSATAAGEAMLFNGAGGGAGGVG

SEQ ID NO: 162905 - protein, 225 aa, Heterodera glycines
FEMLRKLSDAYQKALLTPIWNLVQQILDENCRVFFGTLNGVFRQLEDREIAANCLISGRGGIKGQIRLAQGAEKVLSVSGQIHSPSIEPDRMEVHDLGNVTAGSSSTGRSLHTLCTFASVGAANDYVPAGVVTAPLALSGSKINCIGRSLVVFQEGRSALGSGVIGYAKDTRIFSDEFDEIFRNLITQYRNVNVSDCWLVLRDGTSSNPDCRAFFDMLDEILATE

SEQ ID NO: 162906 - protein, 145 aa, Heterodera glycines
MAKFLSGIMFCALLALLDTTSAWKREFLRMPKSNEIGTADDSSESGKNLKSQSELIASMLPKRKTLQCYYGVDMFRTNNGTEGGAFEEVKCDDEDYDRCLIGKCKGQNFVEVRKFCATKDGCAAFGCAVEEELECKTCFGELCNL

SEQ ID NO: 162907 - protein, 276 aa, Heterodera glycines
  unsure (1)..(276): unsure at all Xaa locations
MDSKSNDFEARRTVWDSKVPVEFTLDNSESVLASHQSCFMMLSRVSYFPVYLDKALKVLTSGDASEEQLLNVWLQFDGQILRWHYPIGVLYDIYHGNAGDGQTTPWPITVHLKNFPDELIRCRTKETLKFCFLQSLKEACQLKLGSNIAASMTKDEHGRLFDGLCNDRFNDFWMVNDKLMGLRSSSGEEQFSTIPARFYESSYSFRQLLLHSKKQLDDGNMGEVLLIDALHKVFPDYAIETDFEAVTHGILLPLNTPLIWLARNLVYPDNXAHIVI

SEQ ID NO: 162908 - protein, 214 aa, Heterodera glycines
MSDQQQSKIVGTAGAVCALGTVAVLLLLLVQRKKKQRQCNTEEYVRAGHVEQLYIYPMKSCRGNKVDWLDCGERGCAHGEQRDRHFLVVDSARQNQMLTGRIYPKMLLISVHVEQGVLRVDFPNRSSPVEVNLKEVEERNVVLRAKLFSDLQTDGLDCGDEVATALDEFLLEGKAAATTTEDGSGGGTVGRKLRLIYYGGDWLYTERDPKPDKS

SEQ ID NO: 162909 - protein, 301 aa, Heterodera glycines
MSPNTLCSIVCLLLVCNFIWADDEHRSFAEELVRRLRRSHGYSVGYGGNCACSSSAYPATASHTSYTAPKQTSYSSYSCSGSGCGHQAYQPPQKTSYHWCTGTACNKAQAVAHPVPVSSNSYKSSCTTCGSSSHQQHYSTVTETKTVYPVKTYSWCTGTACGAQAQPVAPAASGGGTSISTGSSCSSGTCGQQKQQVQPVAPVQPAAPASTSSCSGGSSCGAAAQEVQPAAESSSGSSSSGGYDTQETQPSGSDSSSGACSGASCGEAAQPGASSSSSCSGASCGQAAQPAASSSSSCSGG

SEQ ID NO: 162910 - protein, 137 aa, Heterodera glycines
MSVWCRFPFRKAFLSSAFFPKCVSASDFAFVPTSSALRSFRLFVDGPMSSDALSADRVAAVLRSKFPATDGSAVHVEDTSGGCGAMFHVRVESPQFSGVSRVNQHKMINEVLRSEIRDMHGITIETKAVDRGRDSGQ

SEQ ID NO: 162911 - protein, 208 aa, Heterodera glycines
TVVLSEPLLSSSTVGRRSTTVMTTVVDPSLGSTSHQQHSPSTAETKQHAPTAGDNKKGGGGAKANPFRNHPSLLNSITTDSDAHHLMENCNTVTNESCADVAETEPNDEVFAILNETTSTTAENELGEGLSANNGASSVVTLGEEAASASTTNASTFATAPLMSKSGIWLGARDTDGALYFYHRDTREARWDLPEGEELLIIDKSNVG

SEQ ID NO: 162912 - protein, 257 aa, Heterodera glycines
ILRHNLAAIRDIVYTVEFALGELVESLGRISLDVREVRQQNQLRQLARPVKTTLAMLKRVRHSLDSTGWSLSTLSRSAGTYAGQDALDQFVAMLPQLPKDCYKLVQWVYSLSVWRDLPRGGATSVFLPPSSGTVPFHAKMHPPPPPPAPFPQQRPSSPSSSLLNYYSSESIEDEQNNNNEDSFRNWATVPMNGSLTDRHGGQAKGGRMFVEQQQWHPQNGGALANDVMDGGESTSSTSSILTAEERTGGGGRRKKQW

SEQ ID NO: 162913 - protein, 75 aa, Heterodera glycines
GKGGEVFLSRERHVHCLERAVTHLEESESALALWNDPAMAALSLRLCLSAVGEIAGRVVHEQVLDSIFSQFCIGK

SEQ ID NO: 162914 - protein, 184 aa, Heterodera glycines
MAPLCFQVNEYYAQISELVPGLYICGVTGLTPANMKAFRIELIVNATREVPNLKSLGHIQRMKLWVEDTTDEDLFPHFDIVADQIHAVIQDRGAVLVHCVAGVSRSAAICLAYLLKYRTRSLRAAYHLMCSKRPMVRPNLSFWRQLIHYKQQGKGNVGSVRIVRDEAQPDKLLPDVYLKIVIPD

SEQ ID NO: 162915 - protein, 138 aa, Heterodera glycines
MKLSLFLLALFGIVLVFVAAGDYGYGGYGKKKYGSGSHEYGYGKKKHYKKKHYDSGSYEYGKGSYGKKKYGDYGGKKYDDYGGYGKDYGYGGYGKKYSYGSGSHEYGKSYGGYGKSYGGYGKSYSAYGKAYDDYYKKY

SEQ ID NO: 162916 - protein, 123 aa, Heterodera glycines
EWTSSHFTDNSTDVNQLSSIDSFGLLPDAFGDFDGPNATAGQVLSKWLHIPRKDGLPTQLRCKDFNEQADFGWVNIFKEVATRDGPCHHFFRLIPIHFTVHAPSMPIMPFEFNWQLTLRFLSN

SEQ ID NO: 162917 - protein, 118 aa, Heterodera glycines
MRNKQKKDEEEAQQKLQSEQIVPIPQHEQIQQQPSTFQTPTDWRNSPTDDEDEIEILGCYEIERTNISTEVEGNNEQNSDNNNIITTNCELVHSTNNENNQEDAEKESHEENTVVDVA

SEQ ID NO: 162918 - protein, 196 aa, Heterodera glycines
MFVRCFILPFISLTFFVSFCTAMRRNPSDYDQSRVPSNLRIISWLLGVWRSEHDGKAMFPTIPKFTYGEEISIALSDTRMNGLPAFNYSAFAWSAHDQDELHSENGYITVSGGKVMLTTVMNNGFVTVEEGPAGGSRIRFKLVDIGRISFSRDLPVHDLVREWTQLDHNHFEARLDMETLTHGMQEHTVIVYTKVM

SEQ ID NO: 162919 - protein, 217 aa, Heterodera glycines
AMKQTAPITKTGLAKRSLRSGYAFSHCSGFGELIAKGTMFKNIEHLRIPSFQFALHHDSHSNHRSRRHSLSRVHPALSSANSSTGHSSDQQILNPIVLNSDNDDGEGAAVSSMTHFSPTSSNMTTTTTLGGGNAKSQQKIRPILPPPPAVPNSSRLHQSQHHSHQYRHHKHHQPTSTRRSTIESLVIEQPPSADDEKDDGMTPMITQIVVVKEEDEE

SEQ ID NO: 162920 - protein, 257 aa, Heterodera glycines
SCPFIPAFPIKMSQFGPAFAVNANNPYAHFKCCCATFNIKDHAQFCGVLSFALFLCLVLISMMLFGSLSLFYIFVGVVVYILLMKTLFGVVNKLSLLFYIFFEAIQIGFYLALMLYIIVPLLFLEIPRRNCRNVEINSEICDEPRNRSEDYVELLLFVSLLASIKLHFARVFAHFYRYLTWNEQCSVHRAQYINGRGIHITMDQPQFAASFSPYYGWDTHTVKGCDRRGRQNETNNPNQLPITELPPTYAQVIGQNA

SEQ ID NO: 162921 - protein, 202 aa, Heterodera glycines
MFRVAKTPAHYQQSVRSFATLKDISIRLKSIKNIQKITKSMKMVSAAKYAKAERELKGARTYGEGAQFFVSNITAGDQTEPVKVAESVVESAGRKRLLILMSSDRGLCGSVHTSVAKTAKNIMANKPADVDYKIVCIGDKAKMLMQRLYAKEFLFTVNDIGRSPPTFQDASIAANAILSSGYEFDGGEILFNRFKTVVSFET

SEQ ID NO: 162922 - protein, 238 aa, Heterodera glycines
MLHGWRVFASCSKSVLKSPSLQSGGYGLSRRLKSDEVRGPVIGIDLGTTNSCVAVMEGKQAKVIENAEGSRTTPSIVAFTKDNERLVGAPARRQAVTNSENTLYATKRLIGRRFDDPEVQKDIKVVPYKIVKASNGDAWLEAQGKLYSPSQIGAFVLMKMKETAESFLGTSVANSVVTVPAYFNDSQRQATKDAGKIAGLHVLRVINEPNAAALAYGLDKGEDKVIVVYDLRGGTFDI

SEQ ID NO: 162923 - protein, 229 aa, Heterodera glycines
MSSHTETMKSSSNGSDWPFCSDRMKMMQKPAKLNLNEAGPAPPSPCSVKTPLEGVSTEDTLQRLRPKEDQAEQSPTGTLATRTPKDFFFIKVLGEGSFSTVYFAKEVTTGDEYAIKVLLKSEIRREAKVRYVLREKDIMAALTYVHGGHPFVIRLYCTFQDNDRLYFALAYAKHGELLDWLRRLGSFDEAGTLFYASETLCALEFLHRCKGIHRDLKPEDILVGADWHI

SEQ ID NO: 162924 - protein, 185 aa, Heterodera glycines
MTSSRSRTRRTTTNAASTAAAGRSRSRSTHTGRRSASRRAIGNRATGRSSSVRNASRRVSRRVSSARKSSRRRRRIVARRATPKKRSKSAKKRGRGRPRKPQRGRSARAQRRITITQGVLDVPGHGQMTEAELREIFMAGTTANEPTNRPLGGAEVITTTNANNRTTGGNATSSSSSSPSLSDSV

SEQ ID NO: 162925 - protein, 203 aa, Heterodera glycines
MVKTLWIVRHAEREDNINSNWQKNANPQKLKSDNSPLSSRGIKQATELAERFSNVQIDHIFASPFERTVQTATFLISQRKIPIKVEPGLAEALYLCESPPGFEESAELRRRFPLVDSEYRSIYEKPMPREGFGDESCIQRIRQTLEEILRRYNEATSIVFVSHGSPIGALHEVLVGDWNYVGQATVSKFVETGDGTGKFRQEF

SEQ ID NO: 162926 - protein, 122 aa, Heterodera glycines
LISGEQSPRWTREDLLRYSEPKLGYTRDSVGFLNFVEVLMGFNSAERKAFLQFTTGCSSLPPGGLANLHPRLTVVRKVGSGDGSYPSVNTCVHYLKLPEYSSAGILRDRLLAATAEKGFHLN

SEQ ID NO: 162927 - protein, 320 aa, Heterodera glycines
CVNEIIAQLIVAQKEGRDVNLNKLKCEIASKYGIKTQPKLVDIIGAVPPQFKELLLPKLKAKPVRTASGIVIVAVMCKPHRCPHINFTGNICVYCPGGPDSDFEYSTQSYTGYEPTSMRAIRARYNPYLQAVGRISQLQSLGHSIDKVEFIVMGGTFMSLPEDYRDYFIRNLHDALSGHRSCNVKEAVAYGEHSRTKCIGITIETRPDYCLPRHLDDMLSYGCTRLEIGVQSTYEDVARDTNRGHTVKAVCECFHMSKDTGYKVVIHMMPNLPNVDIERDIEQFIELFENPEFRPDGLKIYPTLVIRGTGLYELWSANKY

SEQ ID NO: 162928 - protein, 107 aa, Heterodera glycines
CAYINYRPSFYLFNHPIIRQHILLIPLLPLKSVATTRPTSNASANSRANDCANATGGDACLSELASENGRERGVYGTDRHRHHCKTAPQCLSVCPATCSPTICNGRR

SEQ ID NO: 162929 - protein, 203 aa, Heterodera glycines
MPLTVDVSFLQSGGYPRTFTLSLAMKVTDDERKAKRRFLNLMRGFDTEDLDVLRKAIESGGINIKQCAPGPPMDLVEEREESISSGEEAEQEPEMMPGCSATIVSTRPRHSIKQMERDRILFQRQRFPTVASIHHQPATSSASGVLVPIPTTDGAAAVPGSAGGYQRRYSTHREQQLQQRNRRDSKFSRRLAVYTSPPEDSAA

SEQ ID NO: 162930 - protein, 314 aa, Heterodera glycines
MPDGKAPHFPQQPVARQNDDGSLELECFLEANPVPEIKWFYENNELKPTKRFSFRLDNRGSEAFSAILQIKDLADSDTGAYRCAIVNPFGKGNANFNLKLTGFSSPTFIEKPQISSRDDGRVMIMEFKAKSILKPTFVWQKGDEIVAESDRYKIILKETGNHEYYAALEIVEPKKEKDAGQFVCTAKNESGKLTATFSVKFEVPQGAPTFTRKPQILQKTSDSGDPAIVFDIGFQADQNPEVIWLNPKGKKMKESSRIKFGLTPDGGANTYTAQLELKNYKAKDSGTYTCNIKNDAGEANVELTLNIEDDEVKQ

SEQ ID NO: 162931 - protein, 213 aa, Heterodera glycines
REYLPKVLGSSFAATIGPYRGYDPNIDPTVANEFTSQAYRFGHGMIQEFYPRLDSAGRTIPSGGFAFVDGTLHSDHFIFQGGPDPIIRGMMSQQLKRPQRLTRTITEQMFGTTDLGTINIQRGRDHGVPSYMRFRQLCGLSTATTFDQLSREIMSVEARQNLQRIYGTPDRIDLFVGGMLEDPVVRGLVGPTVACIIGPQFARTRDGDRFYFE

SEQ ID NO: 162932 - protein, 148 aa, Heterodera glycines
AFGSQDGVVSFVDIRQVNRQLPVAFKVSQHPISRIKFHPIFANNFFSSSDSGLIHWDASALAQGANLNPPTNGREMTGHESAADMRTTGENEHTNIWLSPHASTSVNLRVLIDEDPLLLSSFDVVNGAIVAASHTAELVFMSNDKFTN

SEQ ID NO: 162933 - protein, 249 aa, Heterodera glycines
  unsure (1)..(249): unsure at all Xaa locations
MSVFLNSVRRLSVISSAMKFLRQQEAIDIDRELFTSCGFSVDQLMELAGLACAQAIGETFEKGNVLILSGPGNNGGDGLVCARHLKHFGFSPSILCPKPSQNDLMQRLMLQLECLGIPFVESFPDPNSIEKFNFLVDAIFGFSFRPPIREPFNKILKQMESVQNRVPIVSIDIPSGWDVEKGPPDEKSGLPILSPLALISLTAPKQCAQFFKGEYHFLGGRFVPPALVQKFGLENMPPYEGSXQFMRLN

SEQ ID NO: 162934 - protein, 90 aa, Heterodera glycines
ASPCFLPFANFLPSDSEFGEDTSFGMRPVLPGSGQEFALALGGNRPREQFTIIILAYNREQVLLNTLERLNNLPYLNRVLVIWNDVHRLP

SEQ ID NO: 162935 - protein, 322 aa, Heterodera glycines
MNLLHKEWYTEFSPDDAQRIAGTGDGCSKMMKLDGAELSGAWTGQAFSLNVDKILFSERSKFQDVLVFKSKTFGNVLVLDGAIQTTDRDEFAYQEMLAHLPMCSHPDPKQVLIIGGGDGGILREVLKHPSVERVVMCEIDEMVVQVAKKFLHGLATSFDSPKLQLHIGDGFEFLKGHEAEFDVIITDSSDPIGPAESLFGKSYYQLVRNALKEDGVLASQAESIWLHLPLISKLMNCARDLFPSVAYASATVPTYPSGTIGYLLASKRQMHVLSVPLRPLNDSECQSMGLKFYNRLLHSASFVLPNFAEEALNQQQNSGRDQ

SEQ ID NO: 162936 - protein, 291 aa, Heterodera glycines
MLFLPLSLLLFLLHRPFANALGCMSAVCAAGGPSPSSHAVNRIIRCASDSFCGHFRALRRNDQFVEAVDLSCPEFAVVRAPFDGEISAYRPMGGSRAQEGTKGECVPDQGVRIDGRGQWQGYHALISSVQLFRFGGEVNAGQRIGVARDLECAGTRPKPRGDENFVRMELFREDKPIDPTHHLIDCMCTGQICETNRANALEGLPFKFDSRFNGVRGWEIVCPNVRPEEPNSSGESPEQSDNRQTMSPKIYSPIEGEVIGRVRLSASSNSQSYSGCANEGIFVVGTGKWTD

SEQ ID NO: 162937 - protein, 166 aa, Heterodera glycines
MIGMMNNAGMDGPAEFFAGRRDLCELLVPASSLAAVDGQAQPHAPPPKVFEPTQQKKLSYTGSGRRLVDGKPEVNETPEEMWRKAMLRATCTRAVKEMLGEKRRKSSKLRQLISSQSGSIRNFFGTAKNLRHRTTGANQPQQQVEAGGKVISSRTEGPGKPDRMII

SEQ ID NO: 162938 - protein, 197 aa, Heterodera glycines
MEAEADFDSGLLSTEVSHRRRSASVSEDYSVQKTNDDATECKFVAAQLGYYSDRFIPAFIHACNSEKPHHRDPEITRGYWARTNAITSMVVQFVQLAGPSTQILNLGAGFDTLYWRLKDAGLSFYKFVELDFSSVTAKKICQIKRNKNVNLTEFFSKTVEEKQHSDLHAGDYHLIGTDLRQIREFDGKLATADLDFS

SEQ ID NO: 162939 - protein, 177 aa, Heterodera glycines
SVSPPPPPSSNECPPPLVPCQYEYLDHTADVQLHAWGQSLGEALEQLTIALYGDMTIEIDRVEPIYTMDFSASGHDLSALVYNLLDNCLYSFCAEPFFIGRFAKFLNLKKPSGNTGEELSVQIRIWGESFDPQKHPQGTEIKAITYSNMQIIRKEEEEDEGGKVPIGRTDIFVIVDI

SEQ ID NO: 162940 - protein, 238 aa, Heterodera glycines
MDHTPWRVVLYVIDDFRIHLNRRFDHLEQWQIVLYTLSFVLFVQWVRKVLKFEEFVSFRQLWNDSLLSFSTYKHKWEENKENAYKELEDRMHRADRLKEFYKYLPDRGLPPDDIIREATAYKTMSDILFERGRLCGSLYAVEDEDSNYQRMIKQVFELYSHTNAAFPEACPSIRKMEAECIRILCSLFHGGAKSCGVVTTSGSESIILACLAYRNSAHKNGIRRPEIIVPLNAHVGIF

SEQ ID NO: 162941 - protein, 292 aa, Heterodera glycines
MADFEGRVKAYRFVAYTTVSFSIISLLSVCLTLPMLKSYVSNVGMKMDSELSSCQHNAKDIWSEVSQLKGLPLLVSGNRTARSAYGSCQECCSGGAQGQPGQPGQPGRPGNPGAPGSPGQPGQTPQTPCEQVHPPPCTPCPGGQPGNNGPPGPPGAPGSPGQPGTGGGQPQPGEPGPPGPNGQPGQPGQPGAPGQPGQPASPPQTEPPPPGPPGEAGAPGQPGQPGAPGQPGASGQPGPKGPPGGPGQPGNGGAPGQPGQPGQPGNPGERGICPKYCAVDGGVFFEDGTRRR

SEQ ID NO: 162942 - protein, 116 aa, Heterodera glycines
PICPSKINDTIRTFPKIRPFLSFISQLPLLPIPRPFPSLLRFRSVGSVCLPLFSALGIIPAVGRADGPSTKDSVRFRLFHRSVPTRVSRYPPLGSSICELPIPFLSISNSSCPSDL

SEQ ID NO: 162943 - protein, 271 aa, Heterodera glycines
MQETHIVLGIASVCSLLAIIATVVTLPSLYSEMSQMNSKVRDGVEAFRVNTDSAWTDLMDVQVVVTPPSKPRDNPFNSIFRAKRQLPGHCQCAGLQQPSCPPGPPGPSGPPGQPGQPGGAGQPGQPGQPGQPAPPCPPQNIPCPRCPAGPPGRPGGQGPPGQQGAPGQPGTPAQGGGPGTPGAPGPQGQPGQPGRPGAAGQPGQPGANGVVSRPIPGPKGPPGAPGQNGNPGSQGQPGQPGGQGPPGPPGAPGQPGQPGNSGQPGQPGAPG

SEQ ID NO: 162944 - protein, 80 aa, Heterodera glycines
FINFYKHSAKLSAIFNLQSLITVVLLLICTCAFLRALLPRLIDRNKQGISGVFWKCARIGERLSLWVSAGCFCMAIYLLF

SEQ ID NO: 162945 - protein, 106 aa, Heterodera glycines
MVNVPKARRTFCPGKKCRKHTNHKVTQYKKGKESTFAQGRRRYDRKQKGYGGQTKPIFRKKAKTTKKIVLRMECVECKHRVQKAIKRCKHFELGGQKKSRGQVIQF

SEQ ID NO: 162946 - protein, 209 aa, Heterodera glycines
MIPLFPLRGPFSSFPRTFHSKSPLHQTKTSLLVGPAVRLLLGHYDIKTSVLRASGPKKNILKSDVLSHINDKKLSPIKAFSAKPPSKMSLENEVISASSHPIIPLKSSGRSEPTHRHVHVDIQLSEMRQNQTKQFVQSRNSIPHAYASAQISANKILELLNRLSERVDFKLSLNDFIIKACSLSLRSVPELNVHWHGNSIHHLSSVGIS

SEQ ID NO: 162947 - protein, 212 aa, Heterodera glycines
MSNQSTSSAAAAAGSTAPPSPSNEASSPSAAQASSQSSSAAGDSSASPNGPRLKPRKVPVNRFRDVRPALQLRLSQLKHPLIRKLEQDTGIDRERLFYMAMAYFVFLLLFTQCKLLLSTLIGSVYPAYQSIVTVHTQAKSEEIQWLTYWCLFSLFSLCDISFSVALPFYALVKTIILLYLALPQTYGAHNFYVIYVDPLVEQWMLMVNEIAG

SEQ ID NO: 162948 - protein, 212 aa, Heterodera glycines
MASPLRLPQRIGAHHFWHNFDNFLFDADGVLWREQQPLQGAVELIGTLLKAGKKVVVVTNNSTQSCAEYVKKCQRIGFTDLDEQNIVSSGMVLAHQLNKMKRSAEFGSTAHLPVYLFGSVGLQRLLKESGIDSFGTAPDPIPADTATFVSDLPNLDLGVPRPFAVVAGYDIHLSYAKVMRAANWLKEKAVPFLVTNEDATFPRTNPEIVIPG

SEQ ID NO: 162949 - protein, 213 aa, Heterodera glycines
  unsure (1)..(213): unsure at all Xaa locations
MDFEARIKAYRFVAYSTVSFSIISLLSVCFTLPMLQNYVSNVAQNMDRELSACQGSAKDIXSEVNQLKSIPVVGGNRTARQADGYGRGGGAVSGGGGGGGSCSECCSGGGPGPAGPPGPPGNPGNPGAPGSPGQPGKSVSAPCEQATPPPCKPCPGGQPGQPGPPGPPGQPGSPGQPGSGGGNPEPGPPGPPGPPGNPGGPGQPGGPGQPGQP

SEQ ID NO: 162950 - protein, 215 aa, Heterodera glycines
MAEKLKRAKVRLEFSEKMFYERALTEWRDKILKDSGNKNHAFVLRKALCNLKLFSLDVNGFSDLRKIRGIGVDIATRLSSAWKFTCATHFCTESPTIGQIKSLKSGEAFVLIEQSSTENGGRVPLVAGAKQRKAIPSQIGQQQKSQTNGKQKGHHFETAPLVRSNSQECVVMHKSESLEVMDFDHLLNVSVSNQPFLLLLLRIVGQLSQCLLRPL

SEQ ID NO: 162951 - protein, 211 aa, Heterodera glycines
KDDVLAFGDSAGRVGVWDLARSQCRQTGLGQSTRGPVQRVVFSRLTGDYTLAAQHPTSVVVWDTERLQSLFSLQKPGHSIIDIDMCGLNPVYIASDGMFRFAFSDTDEKSRTNNTNLNTSPPLIKSDIPLLLRPSYCQALLSLLSTDTPPAAVAEQNNNDDDTTTKSNQENFVPFGGDHDGHQLHTFDDPDIDHLINRLSAKCCRTPLDRA

SEQ ID NO: 162952 - protein, 212 aa, Heterodera glycines
APPQQRPPVDLIPKAPYYELPAGMMVPLIGIEDITYESLREKDLRLPPPEAPSDQLMREIDRFYIALQPPPPVDCVRDADGWEVNGLLEHYIKKREQKVKLEAELKEKGKTFEDAITNKYVPPQTTKKSESKKSKSRSPPSSSSSASSSGSTSGESSSESSSRSRSRSRSRSSSRSRSTSPLNQKSQSPTFKRLRRSRTRSPTPGGPTKFWR

SEQ ID NO: 162953 - protein, 211 aa, Heterodera glycines
AESTGYIIGDSELELARAFRTPCPLCLITISVPASLYAVFRDEAKSNSRNFVSHTTPPAQLRSCSIFDDAQMFVPIHLTDGRVISLPIDSQSTPFELCEMLCQQICLKDAFGFGLFLAVGRRFIRSLGVGSECVIDAIASLETKSEKNWRIFFKKELFRAHQSESDDPLAIELAFRQILGGIHSKEYQCEKEDDLVTLAAQQHFIDINGQD

SEQ ID NO: 162954 - protein, 185 aa, Heterodera glycines
WIDRSVVSICPPLFLLRLRLLFHGRFLFHLNWDGSSAFASRFHSADAQATAVQLALDALLLDALRDEHTARELTVDRFAVVLLAMFPIDDDFITNHLHVDLLGAEAADIDFVSEFALVRDVQLSGVVTKHGLHPVKEVVEFALQLAEGRKDVANGGHRPQRTAIERVVGEGRKHFDEKRIGWKFF

SEQ ID NO: 162955 - protein, 206 aa, Heterodera glycines
DSENALQSFKEFTGCTDDDSARRLLSKCAWNLERAIDFFFSGRREEGDGEVMWDEQQPMTSQGTRRRISHFANSLWTTPAIGGNAANGNRRTDETSHNQFRTARMDDDSVQTLDDSDVQMVEESDRKAAPPPKAVNGSASSDGVRAPIAPVQGVLIEQSFRETYQNRERLWNPVFEQYRQDHQQPSSSSAAASFLSRRANGANNRI

SEQ ID NO: 162956 - protein, 281 aa, Heterodera glycines
MNKTTLKARFGSDIRKNWIHHSNDISLNDLVTKMQRYFDIKDANAIKLKYRDQESDWVTLADDDDLAYALASMELLYVDVIVEKYQFKQDEETVEKTAPPAEVVKAVAPPRDATPVDNGDVAQLQKQQRSSTTPVSSIGELTEIPLNGPVTPPVNMGGMYGQPQQLPQQAPVPQQTPIPPPPVSGGGMFYGQPQQQQPPQHQQQTPFPLPPVSVGGMFYGQQQQPQAPMPQQQQPPHAPMQQQQTTVPPVTGGGAFYGQPQQQPPLHQQTPMPPPPVSAGA

SEQ ID NO: 162957 - protein, 165 aa, Heterodera glycines
MRGTHNQPTKGQPKASAAKAVVQQQSPEMVAWLRRKEYDPRKAAADQSQREAQQRQQQNSFMACRFFSTSANAKTPFARWRQNRKSQQTMADQRSNRSHDDLSRLGESMDDESLHGVAVDPCSNSLQRTVDELTQKCHKSIELLKLCNQSGLSSSVEQLLEKVVE

SEQ ID NO: 162958 - protein, 284 aa, Heterodera glycines
MTISVEIFDAKSPSRPGFTIAEVEPEDTVRQLKRKISQKTHLSVDRIALRLEPKGKSLVDEQLVSQLNLPATNAQLYYRDLGPQIPWKTVFLMEYAGPFFIYPLFYLRPALIYGTGASMAPVATAVTIACICHTIHYAKRLYETQFVHRFSNGTMPFQNLFKNCTYYWGFSAFIAYFVNHPLYTSPSFTQVMIGLVGFTISELGNLSIHLLLRDLRPPGSRERKVPYPNSNPLTLMYNFVSCPNYTYEVYSWVFFCVMTQSLPAVFFTLAGFAQMKIWADGKHR

SEQ ID NO: 162959 - protein, 225 aa, Heterodera glycines
  unsure (1)..(225): unsure at all Xaa locations
TFSSVGTAGQRCTSTRRLIIHEKVYDVVLERVVNAYKQLMDTRIGDPLDERTLIGPLHSRESVLKYKTAIAEAIATGGRILCGGKVLEESKGNYVLPKVITGLAHDAPVVLRETFAPIVYAVKVADFEEAVAVNNEASQGLSSSLFTQNVSLLSEWIGPKGSDCGIVNVNIGTSGAEIGGAFGGEKETGGGRESGSDXWKNYMRRSTCTINFGKELPLAQGVKFE

SEQ ID NO: 162960 - protein, 214 aa, Heterodera glycines
DSCPSAAHCQQKRRRKGKMRTKMHVVVLGPKKVGKTSLLKSLINQHDPKPSTSSSDGQLYVPTVEDTFHVQFGDFRSVDQMPQRSLLILFHDTAGITDFGSIELRKPYLQVADAFLLVYSVLDPLALSQMEALKKYLEREKNGTSKERKEVALSVPMPSKKYPFPFQVPIAVVGTNCEMSGKKVNTESALLWASREKVKLFEVSANDRKSVAEI

SEQ ID NO: 162961 - protein, 126 aa, Heterodera glycines
MKYSLLRPFVNRIFTPGKEQQQLVQRNQNEFGMVKTNAGQSAILLRFVSWISGREQIEQHFSRFGKIKETLMFYDRVTGMHRGFAVVHFISPQSAAQAIQHKPHIIDNKLLAVTYHTPPEIRRKTN

SEQ ID NO: 162962 - protein, 213 aa, Heterodera glycines
MSGQIKTPTNQKLLTNVAIVRMKKCGKRFEIACYKNKVLNWRNKTEKDIDEVLQTQTVFVNVSKGQLAKRDDLQASFGTEDQLEICKLILEKGDLQISDKERQVTSESSFKEVANLITDMCVNSETQRPFSLATIEKALHDAHFSLKSNRSTKQQALEMIPKLRESLKIDRAKMRIRVSVPAKNAKMLHPKLKAFFDTTQVENWDKGELEMVG

SEQ ID NO: 162963 - protein, 150 aa, Heterodera glycines
MEGFDIIIMEGTTSPPYFLRSRTRKEGPAVLELIEKLQQANDKVDQQIAEEHQLRNEVLQMAPRAMKKYLGTRFERLMNAKLEFPQMADSERKSEAELAKAKEELRQLKLQAVKEAEEQKRELEEAQRMERELKERVNRKLAKLRALEEM

SEQ ID NO: 162964 - protein, 212 aa, Heterodera glycines
WKLRRPTAVCQLRGHDEHVITCLKLRGDLIVTGSDDCTLRVWSAATGTCVHVLNGHIGGVWALQLSQDGKIAVSGSIKAWDIVAGQCIRTLFGHVAAVHCVKFDGSLIVSGAYDNNIHVWNAADGSLMHVLEGHTNRVYSIHFVSETKLLISGSLNTTIRVWNVDTGECLQTLVGHQSLTSGMKLRDNILVSANDDSTIKVWNITDGTCVHT

SEQ ID NO: 162965 - protein, 98 aa, Heterodera glycines
SVGHSFVINQITTQNLSHCFASLPPLAHLRHQLKSPPPPGCKIVPLEKPSVKLNWRFSRGDKAAKDKNGRRRSRNRKRKKRRMGEGIGGLIDGQLLTN

SEQ ID NO: 162966 - protein, 194 aa, Heterodera glycines
MAPTATSSQEYRQQTYNLPRAIRMVIMGPPGAGKGTQAPAIRSLFGACHLATGDMLRAAVSAGTPLGKEAKKVMDAGGLVSDEIVVGLIRENLDTNPDCRNGFILDGFPRTVTQAEKLDDMLAAKHQALSHAVELKIDDALLVARITGRLIHPASGRSYHVEFSPPKVPGKDDLTGEPLIQRSDDNVDALKKRL

SEQ ID NO: 162967 - protein, 206 aa, Heterodera glycines
MTTPNLPYGAREGSGQFSTGTNFSPPPPPYDAGASSPFEQPHQQHQSPSPYGMMYSGGNVPSPPPPSSPYHQYQQQAPPQMSPPFQPPIGDPQQQFMYDPLLNTARHLGGQFAEQQKQKFTQYLSSTSFNLKYYFAVDTNYVRRKLGIILFPFFHRDWANKCEGDAPVLPCQDVNAPDLYIPLMAFITYVLVSGFVFGVQKRFSPE

SEQ ID NO: 162968 - protein, 144 aa, Heterodera glycines
VKGPELTEFELSLCPHQRLLDAEGVSILQRSVLEHNILAASRLYANISFDGLGQLLGIPAAKAEKVATQMISGEKVQGAIDQLERTVSFEVPDSSNGGADSQIASICELVASINEKLATRFSEWHTERFNEYKRAHQQPNDPMQ

SEQ ID NO: 162969 - protein, 234 aa, Heterodera glycines
AKHPFSCINEQLYMDMADRLAEDGFREVGYQFVHIDDCWAEKARDSQGRIVADPTRFPSGIRNLSDYMHNRGLKLGIYGDIGTETCENYPGSYQHYDIDAQTFADWKVDYLKLDGCYMNSSMMPDEYPKMGVALNRTGRQIVYSCSWPDYFDHNFEEKINYTAVAYWCNLWRNFDDIARSWASVIKIINFFTKHQDQFRKVQAPGRWNDPDMLIVGNTELTVDQAKVQMSIWAI

SEQ ID NO: 162970 - protein, 176 aa, Heterodera glycines
SVQWDKVPYFYPIQIIQFGLGQYNLDRKGAEVIVRPLANRATNAMGTENANGTMALGDGATVRVKLFRRLPLLLFSLKTHRMDSEFVLELEKRRREGGTMEMALFFKHSEAKGCVWSDESIKAPRLSAVFNIGPKPTMRWVDFVIDNDIYVTKALKMLCARKKRTQNKCDAKKGAF

SEQ ID NO: 162971 - protein, 151 aa, Heterodera glycines
MKFSLLLAFAFAVPLADAALTFPSIGYVQSAAVNGTLTCNGKPTHAKVKLYDEDDTDMDDLMDEGVTDEEGFFHLSGKESEITPIEPKVNIYHNCNDDESLNPLKKVCYKKISIDLPASYITDGPVAEKVFPLGTLNLAGSFKGETRDCLN

SEQ ID NO: 162972 - protein, 211 aa, Heterodera glycines
MFAKCLLFLAIIISVVPTENKGYENGYRQCSCGEQTECFEEIKSKTAQCFEQETGKLGNALTKNLVDPTKTKPCFDKFSAYVKDWLSCVDAKLVKESSCLTTKSDIKIQSGDFLTIYSKIVRENVDKRMNYLYGLAKHPLVQLEENWHESAKQCAFEKVAEINCFKKYNCVLKASEKEVQKVAKQCYKEFDVVKVQHNMCECMAKNVPGYG

SEQ ID NO: 162973 - protein, 203 aa, Heterodera glycines
QSVLYLDGVKFSDIQATIQGIFLAACFLFISRSKPLKTLAKQRPMTNIFNVYTLSTITIQFAVHFACLIHIVRLAHALEERPGKTELEKEFKPNLLNTAVYLMSASLQIATFAVNYRGRPFMESLVENKPLFYSIICSFGAMVAFASNTFPDLNNKFELVHIPVELRDTLICCILGDLVCCLLLDRMLNYLFGDQRVRKMLMY

SEQ ID NO: 162974 - protein, 214 aa, Heterodera glycines
ANDSRSSSSASSRSRSPSHRRSPRRREQRRRRSRSTFSRSPSPGQKRLHIGNLDESVRRRDIEDVFGKYGRISDCWMASYPPFYAFVVFENNKDASACMKDLGNTAYIKGCRARVTVALPRNGATYRRGPPPPPRRYYDEEDSHRRRRRSRTRSPRRRRSPSRSRSRTPPRRSRSPRRSARRQRSPSPKRERRDREEKDTKPREAADEHEQQPI

SEQ ID NO: 162975 - protein, 148 aa, Heterodera glycines
MKHQYQNELNTQSSRAVTSPLADDDETLDESRERAYKLVAYTAVGFSLVAILAVAICLPVVFNFVDHIQRQTKRELDFCKSSARDIMFEVGDKQRRIATAFEAVRNRTGGADASFASMPFPSLIAHLQNRRAKRQTEACESCCIPGHP

SEQ ID NO: 162976 - protein, 195 aa, Heterodera glycines
PERDTKMDTTNAEVMDTKKEANAAAAAPVAASDNTAPAPMTWMMDGIVPRDVNVMVDRTTKELRKTTETDGFYDMSQRAQERVMLETAGKQGEIVKTKLKEAIEEARKMIERALGTVISYSEAPMESKMQLEQVFMTLTDETKTPKEKMERIKDIQQKWTPEIRAALKPSTDDKEIAEAIRFFTDLPAQIELGKK

SEQ ID NO: 162977 - protein, 93 aa, Heterodera glycines
FFNCIFGEFIASNSELWRGAFILELGAGIAALPSMTALRYDAAKVVITEQNQEVVEQIQCNLERNFDKKFTREKVRLMSLDWLQPDDSLARVV

SEQ ID NO: 162978 - protein, 278 aa, Heterodera glycines
MIFNHFYTQFYILLNVLASTGFVFCTTEWFGDLRAHMNPPKFPPFYDIVYDEPDCPFGLESVAIPEFVYFGEMIATKFVQEHSQCLQFCLETSKCKAVNFFESIEGKNPEVGFCELLVEGQYDNPRLMRPFKKATYHEKIHCRAENEEEKQPFIFDEKEGKQLLIGNESNERKNTSSTAKQTEKGTNENGQKTTAENRQSEGRMNEQRSQKTTEKQPRREEQSEGRGNGGRKTETKEETAQKSETQEKATEPPTAQLNSLILKRLAERIQELKKRFRN

SEQ ID NO: 162979 - protein, 208 aa, Heterodera glycines
MFRNCLLDLTPLRCAFIANKLAHYSSKTPTFSNCIPSPILSGNQLFRIIRDKIRTSGPITVAEYMQICATSQLGYYAGQNEIFGERGDFVTSPELTQIFGELIGSWVVHELEMTSWKDRWQLVELGPGSGELMADVLNVLRQFDVLQNVEVYLVESSERLVERQRETLKKKFGEDLLRNIRWDDSLDDVPQRFSRVLANEFLDALPVH

SEQ ID NO: 162980 - protein, 220 aa, Heterodera glycines
TPIYYVYMCFRYLNYRNLICICCAPKFRRLLFPDCLCFCARNKRCQNQNEEKADNDEKLSVVREQPLPNNSFEQRRSLGTTGQVSRSVKEGFALFDFSLKLFLSTEQVQKLHDFEGECMVDLAREKEDKRNRTSEERLNRTCERTELILLRVNDIVSREATFKGNIHDLETRLGIVENRQAEVLDYLRQFGAVLPSLVQSVQTLQQQQQQLLQRLSSIPE

SEQ ID NO: 162981 - protein, 274 aa, Heterodera glycines
MMPKNFCGKTSKFSSCLLPALLLIIILSILNSVSSSRRHHSPASGHNRRLSSISSPAVANGGSLFEHRTKHQSVAAADESAGGCAVVPPSLWCGCDKLQTQCGTGRLCGRYTGAMRNEPLHITLLYESLCPDCQSFITETLFDVYQKFKTHLRIEFVPFGNAKVLENGTIKCQHGPEECRINKFHSCAIHFMHDPMPFIYCLEKLISSGIPLEKASKKCYVKLHPIPHIYDQITHCFNGPTGDRLQREAGRLTAQIWPDQHEYVPWILENNASL

SEQ ID NO: 162982 - protein, 202 aa, Heterodera glycines
MHQGIPNVPTVSNNGTSFGRVAPPGISDTISTTTQFTITATNLPITSFVTTQDPNVRSEFEKADAPEILKIFIPPKPPAVPQEAKKIFEDLCAGGKCLVQKPEFIQQKAAVEKESEQIELKLNPGKSAEQVKREVKVRMAKTQQLKKALVQNAGLEGQVEPADNGVFGHDQLLTETQANDLLNELTRHKANRAKRAGNAMFL

SEQ ID NO: 162983 - protein, 221 aa, Heterodera glycines
VTAVTRLKKDYQKLVRDPVPYAIAAPLPSNILEWHYVVTGAPDTPYEGGYYHGKLIFPQDFPFRPPAIYMITPSGRFQTNTRLCLSISDFHPDTWNPSWSVSTIIMGLISFMNENSPTLGALVSTDEEKRVFALRSRELNLKNAQFCELFVGLADQIRAELEAERAAASDNAEGQTASGESTTKKNSRHDSSSLTANLLMVAGVVILFFAVRYVILNATTV

SEQ ID NO: 162984 - protein, 169 aa, Heterodera glycines
NPLVHYEGTAEEIIWACDGKLDAMVVGAGTGGTMTGIANKMRQKLPNCKIIAIDPEGSILANPTNRQKHAYEIEGIGYHFVPYTTDRNLVDEWIKTNDANAFRTARRLISEEGLLCGGSSGANVWAAMEVAKTMGRGKRVVTILPDGIPNYMSKFIDDEWMRVKGFEGI

SEQ ID NO: 162985 - protein, 243 aa, Heterodera glycines
QETHIVLGIASLCSLLAIIATVVTLPSLYSEMSQLNNKVRDGVQAFRVNTDSAWTDLMDVQVVVAPPSKARDNPFSSIFRAKRQLPGHCNCGPPQRPNCPPGPPGPAGPPGQPGQPGGAGLQGQPGAPGQPAPPCPPQNIPCPRCPAGPPGSPGGQGPPGQQGAPGQPGAPAPGGGQGPPGPSGPQGQPGQPGRSGTPGQPGQPGNNAVIFNTIPGPRGAPGAPGQPGSPGSPGQPGQSGGQG

SEQ ID NO: 162986 - protein, 178 aa, Heterodera glycines
MGAMSSSSSAAPSDPQQKSIYEFSAKDIDGNETSFGKYRGKVLLVVNVASNCGFTDSNYSQLKQLLDKYKSKGLEIAAFPCNQFNNQESGCAIDIKDFVTKKYNFEPDLYDKIDVNGPNEHPIYAYLKSVQGGILGFDAIKWNFTKFLIDKNGKVVERYAPTKEPKNIEKEIEKLLEA

SEQ ID NO: 162987 - protein, 307 aa, Heterodera glycines
  unsure (1)..(307): unsure at all Xaa locations
MKSNSKTADIGDFYEILGVPRNASEQEIKNAYRKLALTYHPDRNPGNEQAQEQFKKVSIDYSVLSDPNKRRQYDVSGPSMAMNDFEGLDISELGGVGRFFGAMFTKLGIPIPTQIGPKVLAQARDLSRGNXHKRPLEPGLVLSETVNNQEANFYAFQMTPEFQQHGVIIRCKSLAMSKFKLVLFDQEGAVRHIRESQKKKKYTSAELFFVPFQRINISEFIPIRFYMEDKDTPLPFHFLDTLETHGANVMELQPGKHILCVYGDNFLRMVSYEITFLPLNHYASAAINKINALEPVLASKKSEMQEF

SEQ ID NO: 162988 - protein, 49 aa, Heterodera glycines
  unsure (1)..(49): unsure at all Xaa locations
ERENQREETGLAKITSKIIDSQNXKKKKKKKDLRTKKKKKNFKKKKKKK

SEQ ID NO: 162989 - protein, 141 aa, Heterodera glycines
LSFTLKLYFYDFSEKMRTTKQLVNSIPGKGNTRDPSSEFHWDHWPGNLASVALSEVPRWRSMLSRRRSRSARRSAKRSSRRLSRRRSTSPTCSLVRRVIATSANETKTRIPKKIVIFSTLMRDSSSNLETTKGSRRALKTP

SEQ ID NO: 162990 - protein, 192 aa, Heterodera glycines
  unsure (1)..(192): unsure at all Xaa locations
MDFNLKTLAREASGMLSRAKQLTEEKLLNAEKTELDPHCEQLLAKADKTEEQSKKLLSAMEAYLQPNPALRMGDLFYEKMEITSPAPNRSNTLEYLSEAMQEAAQSFGTETPFGGALQKIAQTEAKLGAAEREMVQTTAGQTLVPIKRFXLEGEMRNIQKKRPVLQKKRLDLDAPKSRLKRARTLEGQATVN

SEQ ID NO: 162991 - protein, 249 aa, Heterodera glycines
PFFAPLPPPQLSSSLWSLFVVQQHVHLATASATFPRPFFLSVGRRPKCSLDSFAASATPKLRYQVRVGVRLEPTSFPHVFSGESHRLAPPVIFLNPNPGRRLESRRTLVVALRQMAPFQCQSVLLRPRPAFCNRLWVLPWWHHRRPSRRLIRSFFVVFVDLLAHFWVRNQHIAQLFHQFHQFTRCQHSFSGFVHPKVILSERLHSVRSEQLFQPLPRRQRHSESVLHSVQAVQADLVTVLALLSPGSEN

SEQ ID NO: 162992 - protein, 264 aa, Heterodera glycines
  unsure (1)..(264): unsure at all Xaa locations
MEHGSLPLQLIILFVLTLQISTQSPEISVPSDVQILSAVRNVDLTTQIVKVKTDFELKNGRNEELSSFVHAMSAEEAARLSWMSAYESGKESGKLRISRVRVKGVSSDMVFHKIEFLDLLMSGSNIKLSVDYALTEYLVPSPKDILQSENQLVIFSGTANVLSAYPVMKENCVYKIGSSKPISFTEIAPSKHSQEKISYGPYENTKAYSKKPITIHYENNAPFLVASSVERIIEVSHWGGNIAVEENVEILHKGAKLXGSFSRL

SEQ ID NO: 162993 - protein, 98 aa, Heterodera glycines
MSAPPPYNPNMQQYPQQPQPNYGQPGYGGGGGGYGYPSQPYPQQPNSYGGGGYPQQQQPQPQVVYVERDRPQQQGSNNCCLWALLACCCGCCLAECCD

SEQ ID NO: 162994 - protein, 205 aa, Heterodera glycines
MSESASDDENAHLIEIKFKTIQETYNVKVNENSTIKQLKKTMAKKLNQPEEKICLIFSGKILKDHENLSQHHIGDGMVLHMVIRNQPSTSTASAATTSSVSTAPTGGAAPNLAGTPPSLGGIGDLFNNPELVQGILNSPFMESMLANPDIIRTMLSQNPQFQQIIQNNPELGHIMNDPGTMRQAMEMIRNPTALNELMRNHDQAI

SEQ ID NO: 162995 - protein, 311 aa, Heterodera glycines
MLFQRQKLPKICATLFPKCQIRRSSNFVELAGFTASTDSKQYAAKKLLLLKNGSSRSYNDVNVAAGRFAALLNKKYGIQKGDTVLCRTSKNVDALALYLAVLRLGAIYVPLNPTYTKRETEHFVNDAKPKVMVSLNASEDASFTQSGFDVKHVLCEKRLAEEALKQEPSCEVEPAEKDDVACILYTSGTTGRPKGAMVTHGGLVANAETCTDIWHFSENDINLHVLPFYHIHGLFISFNCTLMSKSSRIFLPKFDVDETIAYLPKSTAMMGVPTFYARMVEHAGLNRAAGKNMRVFISGSAQLTPQVVEKF

SEQ ID NO: 162996 - protein, 261 aa, Heterodera glycines
MSSSTAELNPEDGGHPPQNTAVAIEQSQQAIHPPAQSGSGKIAAWASPNADDTEPYGICAKILIVLSYIITIITFPISVFMCIKIVQQYERAVIFRLGQLKKGGAKGPGLFFIIPCIDEYRKIDLRVVSFQVPPQEILSKDSVTVEVDAVVYFRVFNATISIVNIENSTGSTKLLAQTTLRNVLGTKTLSEMLSERENISHQMQEVLDEATEHWGVKVERVEVKDVRLPREMQRAMAAEAEATREAKAKVIAAQGEQQASR

SEQ ID NO: 162997 - protein, 272 aa, Heterodera glycines
  unsure (1)..(272): unsure at all Xaa locations
MTSTLRGFCLSPADQQTNLFSFCSEMATNASQKRKEIYRYKASFNVYAMGWSTKLDNHLKFRLAIGSFIEEYNNKVSIVQLHEDQGEFGHLGTFDHPYPSTKVLWIPDPKSAFPDLLATTGDYLRIWRIGGHNGASLEVRLDNNRSSEYCAPLTSADWNEVDVSLIGTSSIDTTCTIWQIETGQAVANTEPXIGGNVKTQLIAHDKEVYDIEFSKLSSGRDIFASAGADGSIRMFDLRHMEYSTIVFEEPSKKPLLRLAWNKQDHNYLATFA

SEQ ID NO: 162998 - protein, 176 aa, Heterodera glycines
  unsure (1)..(176): unsure at all Xaa locations
ARRKRIGHFGVRDSRRQSRKRKKFESPQAVPPAANTDFIQTARGAIRRQSLRDRSGMTLARLDSQREGSDLIRSWSKEDVSNEEMSAHHFGNGGPSTSHQPTANQQRRDSPPKRMQKQSQQKQKQMSPDEWLKKLEAESGGLRDEEEEQAEKNVXERERRGEHAEGSESTERQRGD

SEQ ID NO: 162999 - protein, 213 aa, Heterodera glycines
LDSADAENLALINRPDLGVTFTKLHCWRLTQYSKCVFLDADTFVVKNCDELFERPEFSAAPDVGWPDIFNTGVFVFVPSEQTYRNLLDFALVYGSFDGGDQGLLNAYFSTWRESDATHRLPFTYNVTTVAIYGYAAALKRFAPNIKIIHFLGKQKPWALLYGDGAAGMAFVSDYHKQWYQLYANIVQQLLPPSSSVISSSTPSSLPSSSFSII

SEQ ID NO: 163000 - protein, 208 aa, Heterodera glycines
MPLTDDRVRCQTDGDTGHVSLIISKCRPQDGDEYTLMVKNAHGKHKVGAKLLVTPAAESNLDIRAKQKKRGTGFSNSEQEKQRQRSDAEPKSKAERRKRQVYVVEEPRDTFVVPLNSQHANEKENATFECEVNDKEIDVKWFHDGAEIGMDGRHFKERAGCRRRLLIINVLIEDHGEYKCTAKDDETMAQLIVHPKFVKKAERKPVTF

SEQ ID NO: 163001 - protein, 111 aa, Heterodera glycines
MLRPPHFPLLLTAIVVVICLLSGTANGDKNLLDELRDLDIFQLKSGVSACPLLVGERCPESSPLYYFKCCGDLYSSCCVRLQDWAVGVIALLIVLILVAAFINLIRCIFCA

SEQ ID NO: 163002 - protein, 165 aa, Heterodera glycines
IANCPFLFDRFFYFRRFSSPPKMGEVRFHSDYVSSNRGITKIIQIVLGFVVCSVLCSNWYGGYSCFGEGRLGYVSGLNFVCLMINIILFLLNLFNIRPLKLEQLYNVAAALLLLVGIVLLLWYIIQYSYWNIWMIIAAVCVLIIFLLFQWDFKGNRTMSEGHLPI

SEQ ID NO: 163003 - protein, 357 aa, Heterodera glycines
MALLPLFLLLLPFFCPSLCSSDLPECPWVNPEKELQKWANLPVFPSKCNVTKDTPAEESGDEKEYWERGQHRYYFNQWVSDKIGPTRKLDKMAHPKCAEIDFSKVHSKVTVVVIYHNEMLSVLVRMINSIFNESPAHLLTEVILYDDFTESNLDIGDSLKEYAKIAKGNWESKIRFIKASERQGLIRAKVLASREAKGDVLIFLDSHCEVTPGWLEPLLAPIEENPKRVILPVIDLINANTFNYEKAMVAKGTFDWGLYYKWDYFDWSYFDVEENNVKPYKTPAMSGGLLAVSRDYFREIGEYDMGMEIWGAENIEFSIRVWLCGGEVLVAPCSRVGHVFRMRRPYRGKPGVDSSLY

SEQ ID NO: 163004 - protein, 264 aa, Heterodera glycines
MENCLSNGNDLCRSGSFLLEMKPSTDLASLFVSLPGPVSNEGKAVDEPLGIMRVDNQSLEIAFDVQDIAEQTGCQSADFSSSMFFQKFGAKFVDIMLEPTTLCSPSWADAQQRLIMCKVRAEADCVTFAPKTIGRLEEELAQRCLLREYVERIEHNRTFHVNCRRCGHLIHSHSKGDFVFGVFPNDDWLETAPQMDYFCALSSDCCGAHLEMSSVQPRNSGEGILGFSPVLSADSSRHWLPGERKIVFSNSFILFQTLINWQRK

SEQ ID NO: 163005 - protein, 172 aa, Heterodera glycines
LSSKVARPKLAGLGARDVLRTEARLCLFGNEIDERTTPVEAGIAFVIAKRRRQTLGFPGAERIIRQLEKKDFVKKRVGLASTKAGRAARNKMPIANPTDGSSVGFVTSGCPSPTLGKNIGMGYVDKAYAKVGNILTVEAGRDRMIEVEVVKMPFVKSAYYLKPTSVNEDKKK

SEQ ID NO: 163006 - protein, 114 aa, Heterodera glycines
FLLRRRFRPQHQNRENQQQHPAEKQPFNAYLNPGFDKRSFDSFTGPGFTGLDKRAAFDTGFTNYDKRAFDSFTGPGFTGLDKRFEPFDGYGFNGFEKRSFDSFTGPGFTGMDRK

SEQ ID NO: 163007 - protein, 202 aa, Heterodera glycines
MHSRVHQYSTRDQVRVPNVIALVGLPARGKTYISHKLCRYLNWIGIKTRAFNVGEYRRQACDFFQQGASEFFSPNNQIGTQIRDHCAKLAMEDMGLYLEKKEGEVAVFDATNTTRQRRKWLVDYCQRERINPKFRIFFVESVCDDPDIIAANISEVKVNSPDYRGKMTEEEAKADFLRRIENYKLQYEPLDNEKDDHLSYIK

SEQ ID NO: 163008 - protein, 196 aa, Heterodera glycines
  unsure (1)..(196): unsure at all Xaa locations
RHEAQFICLFVFLFSKNYLANSHQLPSFPGQQEPLQGHHQQHAQQQQQQQQVNAGAEHQQQHAQFGGEQVKDEGHIKEHLEGKVDPTAHMTPEQLQFHYFNXHDLDKNGKLDGIELIKAITHFHQENASPGHQGASIPPPLPNENELENMIDSILREDDFNGDGYIDYGEFLKAQKLREDQAKSQQQQQQTPPPPQ

SEQ ID NO: 163009 - protein, 208 aa, Heterodera glycines
  unsure (1)..(208): unsure at all Xaa locations
DPDIFSVPPKFPLSIEQTIAHPLRVSAAHLQPTKDKMMTRRAFRXCSECATMLYRDQLSPNDVKPLLQSFALDHFPEIHISRPVKLGPGQNSAIFLTLTNNSSGPIDISLTGKRLEEEENCVNNSDFSLQIVLSNRDSTDEQPKMAHQQSDSRIINISQHRVGICAECVPSADSIDHYALFSLSFSHTSSDLPEKKLKSDVKVSLKQS

SEQ ID NO: 163010 - protein, 219 aa, Heterodera glycines
HGYTAGLLTLPLPALVFLWGTLASPRPSKLFWIVMIIYTEFEIVAKFAFQFGFWPWNGDTVGNNKVYKTEYVFGVQRIQGFAGKDVALLIALFFHRYMLRKFGLWRDASSDRLINEMPKKRMDNGSSSSSSAEKSPQKSTQSTVVPSSSGENFESVAKAQREQNSDDIEKGIKRQRPSYPRVRLLTAIGRDHQRNSEPRLFAQNLFGHLFGARGGRLFA

SEQ ID NO: 163011 - protein, 210 aa, Heterodera glycines
PTLGTSQVKSVRKELKMHLLRMLKHPGTFTLHNLHPRMKQLLIELGASQSEIQRAMPAINEIDEALKKRLAAATAVAAGTARQTTTEPKRHRKEPQQHEQEDLDLRDIKRIKLDEDEYDDGIIDLYKQLDNPDSANAATQKAIDITTNFVLERLSIHVVTKLVMISLYTLPDKMPAAFASSYTPIDEAGSEAQKRHLSRMMAIQMTREGE

SEQ ID NO: 163012 - protein, 280 aa, Heterodera glycines
GLAVFINDEKFMTKLGLTTGFKGKTFIVQGFGNVGLHSHRYLHRDGAICIGVQEYDCAIYNPNGIHPKELEDWKIANGSIRGFPGAKAFEPFTDLIFEKCDILVPAACEKAIHLGNAHRIQAKVIAEAANGPTTPAADAVLMNRGDCLIVPDMFINSGGVTVSYFEWLKNLNHVSFGRLTFKYERDSNYHLLASVQKSLERTFDRAVPVDPSEEFQLRIAGASEKDIVHSGLEYTMNRSAKQIIATTNKYNLGLDLRTAAYANAIEKIYQTYETSGFTFA

SEQ ID NO: 163013 - protein, 200 aa, Heterodera glycines
MMNIRSNGKIRFAVSCSSNMNRSMEAHFFLQKRGFNVQSFGSGNYVKLPGPSVDKPNIYEFDSTTYEHILQDLKQKDSKLYTQNGLLNMLDRNRRIKKCPQKFQNYKEKFCVIICLEERVYDQIVDFLQTRESTTGESVHVINFDIQDNHEEATIGALHVVELCKKLEDCEDLDNEIDEALSEFEANNPERNLLHTICFY

SEQ ID NO: 163014 - protein, 281 aa, Heterodera glycines
EHICTKTGATQIIWSINWDQSHMRRCLINVQSMMVDQEAKEGVIHALNGRKLIFGRGSHICCDGSLQFGADDAAGAWQKVCIESGVRRFDVRNLETLTERVRELLGGVQLVRRPHENVLNTIQQIQIFIGKICSQPKNEREMLRALLSPEIFVEIVNCYQELMVVEGCLQIPCCVEFPPLRKFVAANAIRSRQLRQENLERKWHLELARDACVSKLALSELSWDASLSFKTVRVCMEKLRRIGPEKSAQFARLSIHLSNSPKLFVMFNGRLSVPIDWVKEL

SEQ ID NO: 163015 - protein, 182 aa, Heterodera glycines
MSVHSELARSKILTCRNRLAVRRLALLEQYFELNKSVQCLLDDYRLNIMKAKSTSPGFVVGSVTALLSSQRELSPTIWVETAKSDCGSFLALNWPSKYAGEKGNDLRRRGGETFDGKGAEEAEGNGGHSTDFHPFGVLESQSVKAARKNIQKLLLILCDLANIQRQILSLGKEADETKLAEF

SEQ ID NO: 163016 - protein, 206 aa, Heterodera glycines
MPNLLQVLFGPVVYRPYQPNLLESGGNKLFSIGAGAYNTCVVLSPILVPYIAFSWTHSHHFSFLRFVLVFYAIAFSFRTIGRLTNVDYVRFIKLLGTVRKSPQNVTLLDTLKDYDFQVYAAPADFKASPGRTAKWHPPRERLPDLNPPLNFLRQAIAWTAANTFGRRMLFPGSMALFNSMLNSQLVDGRRKLLTEMGGKRKVIETE

SEQ ID NO: 163017 - protein, 88 aa, Heterodera glycines
MSSLEQLASPHNDFYESLFRQLNPSGSAEVDAASIAAFLKTAHGVSVAQLSQIWEIASELSGYKNRSALNKIGVYICLKLVAGIQHGN

SEQ ID NO: 163018 - protein, 222 aa, Heterodera glycines
MLVLRPPDGEQSVRQLMLLNISCLPINYGTNPRSTHYKRVTRNRLAEKGPDNGDECDTSFWTMMAYRHHFNDQNGTDCEEDAPMLVGAITVSNRNSNCSCCSSNKTDGVVQPQKQMFSVQIQTLAVLPTFRRHGVATRLLNSLINQCEKWANVENIFLHCQTTNEAALCLYRAHGFEVVQQIHGHYQCRAIDGESADAFLLERRFTNENDEERKVRQNAAFH

SEQ ID NO: 163019 - protein, 188 aa, Heterodera glycines
MAETFSLLSPTHLLNETSLNLRCPYCPKKFLKNTEAISHMDPCLKSRPYPCTNCSRRFKSAQNLSQHERIHTNVRPYNCQYCEKNFTQKSHLQQHERIHTAIVKRLINYCPASTTFWVNRPSHAVTVARRSIFIHPKYSTKKVFVAFTRPWTNRKKIRVKRTVSQRLHHFLNRAKRRRPNNHRHGDQQ

SEQ ID NO: 163020 - protein, 151 aa, Heterodera glycines
MNANLLSSTALLLLFSVPFICASIIPQQHTGIQSYRVKGRLLCGDLAAENVRVKLIDDDFGPDPDDDLDTGYTDTQGNFDLSGDTTELTTIDPHLKIYHDCNDALIPCQRRWKFELPNHYITSGKQPNKALDIGTWNLEAKMPGESHDCIH

SEQ ID NO: 163021 - protein, 211 aa, Heterodera glycines
MTATTIAQDPTPSPRRVFLRDLCSLFCCPPLPSAIVAKLAFMPPEPSYRILTNDSGRTTLELIDGRTEWPHGHDELNNVEVFFTRTQRRNKIACMFVRPFELSHFTLLFSHGNAVDIGQMCNFYLGLGCRLRCNVFSYDYSGYGQSTGRPSEKNLYADIAAALKSLESRYQIPPEQVILYGQSIGTVPSIDLASCNPRIAGLVLHSPLLSG

SEQ ID NO: 163022 - protein, 381 aa, Heterodera glycines
MVSTSPSPPIAMAQHAPLSHRQHRAPLAKVLASEKSLYLSMNAIKTPKKAKMQKVAPIRAQIGDHSEWIPLRASKHSRQTVNPIRRFTDSLSVEPNPNKTPIQLNLGDPTLTGCLPPSESVVAALREAIDSHRFDGYGPAIGTQSAREAIAEHFSCSEAPISANDVVLASGCSHALEMAIVAIADPGHNILVPRPGFPLYSTLCQPNGIKTRQYRLKMEEDGLIDLQHLESLIDDRTRAIVVNNPSNPTGIVFPREHLEQILKLAQKYKLPIIADEIYGDLTYAEGAKFHPLATLSPRVPIITCDGIGKRYLVPGWRLGWLIMHNRFGVLSDVKAGIVSLSQKIVGPCALIQGALPRILRDTPQSFFDNTKALLAKNSEIV

SEQ ID NO: 163023 - protein, 213 aa, Heterodera glycines
DGKVERDADGKEVRYPVILSAKEKTIARRVVLAFGQSVCGFDLLRANGCSYVCDVNGFSFVKTSTKYYEDTAKILGNTILRRLASSLSIPWHIPFQDDDPPLVSTPSGKIMELRCVLAVIRHGDRTPKQKMKVAVKDERFWNMFKKYDGPRKRELKLKKPTQLMEILEIVRHLLQESLEKRQTLLTISSKNMARFLKDKRDDLAPAEETSVMN

SEQ ID NO: 163024 - protein, 86 aa, Heterodera glycines
  unsure (1)..(86): unsure at all Xaa locations
SVPDPKIPNSAHRKSTTDSIEIAKRAERERKRKERARERGRKNEREXEETDRQREKTLCHKKYNLNDKWDMWLXKKKKKKKKKKKK

SEQ ID NO: 163025 - protein, 223 aa, Heterodera glycines
  unsure (1)..(223): unsure at all Xaa locations
LRKICQKMARMHKIPLDPDSANVPMFVAKCEQWLANLPTHFEQVEMQQNFDQNFNGSSLSEQLTELIKALETSESPLVVFAHNDLLLFNILFDEEGTGDVHFIDYEYAGQNYQLFDIANHFCEYAGVDECPDYGMNSASEDERRHFLRRYFVYFGQPIEEECEMDKMLCKIRHFEAAAHFXWTLWAIHQAAKSAIQFDYMRYAITRHRYCTRLMTSSGIAKNN

SEQ ID NO: 163026 - protein, 208 aa, Heterodera glycines
APQASPHVAFDYGATKLAAAAPSSYGSASEAQPAPAGDENGTKEVSQRKNATPAQTAQHNNAPPQQPARQTTAAQNVLEQRRAKRRCPREAGFVQADAASGGGMHSPAAAARISHRVIGHTAPSTEYASGPRPAGTDAPRVYAAQPYAAPTRSISSVSKSRGSIGPEYEQTAAEQSPPSVKPPSTRTKAQPAGSAPCNTQRCNGRGGP

SEQ ID NO: 163027 - protein, 214 aa, Heterodera glycines
MDDSHQDNGRKQQNTFLTPKFSILLPTYNEAENLPICLWLIIKYLKGLSYEVIIIDDNSPDGTQEVAKSLQKEFGAGRIKLLTREGKLGLGSAYVFGLKQAQGEFVILMDADLSHHPRHIPEMVTLQEKHGYDIVTGTRYAMGGGVSGWDFRRKMISRGANFLAQFLLQPGVSDLTGSFRLYRKSVLSKLVVESVSKGYVFQMEMMFRAKKGGF

SEQ ID NO: 163028 - protein, 100 aa, Heterodera glycines
LRRIAAPGEHLRICVDSGGCSGFEYKLTLDKRLDEAEDEVIKASEGAIVVVDKLSLQFLRGSKLDFAEDLMRSAFRITDNPLATLGCSCGASFAPKNQIE

SEQ ID NO: 163029 - protein, 217 aa, Heterodera glycines
TAVAKSAAEMVLADDNFSTIVAVEEGRAIYNNMKQFIRYLISSNIGEVVSIFLVAALGIPEALIPVQLLWVNLVTDGLPATALGFNPPDLDIMDRLPRSASESLISKWLFFRYMAIGTYVGVATVAASMWWFLIYEDGPQVSYYQLTHWMRCEIEPENFEDLDCAVFVDNHPNAMALSVLVTIEMLNAINSLSENQSILKMPPWTNIWLCAGIALFM

SEQ ID NO: 163030 - protein, 186 aa, Heterodera glycines
MRLRLRLSPWSFRGAVPGVVWVGADEVFSVSDDHSLCRWTVSKTEANFLSNALKDSIFPTSLSAAFPFAAGRSPFSGGLSIRSGKKQQRTSAIHSSQSAGNELILMTASDGKIHLITPAGKIERTIEAHQGAAILARWSTSEPGGAGGFVSCGEDGLLKMWSRNGMLRSMLAQLGKPIYAMDWNGN

SEQ ID NO: 163031 - protein, 307 aa, Heterodera glycines
MSEEKFEDVDGSIIAQKRQNTENGGPASKKANVIESDNLQIKVLIPSAAVGALIGKGGETMRNLKNDSGCRVQMSKNLEVYHGTSERICLVKGKLAATMIVMGAILEKIQEKIDANHASDHFDLKGLDRTKEMKFVVPNTSAGMVIGKNGTSIKEIRDTTTANIQIYPKAGSEEAKISAERVITVGHESNEVLLSAVQRVLEKVVADPMHAQPVPAESQLASGFEFGGSRLSAGSNQFGGISNMGNNSEAMHGKSFGGPSFKFNPLQGTGNNELLAFLDNLQSTLRSSGFNDQSVSEVMQAMQVLAK

SEQ ID NO: 163032 - protein, 55 aa, Heterodera glycines
RSELKKNYQKNVDGINGMKNMTGKGFGRLYIYSDRLEERRMGIWDGEFTLIPAEH

SEQ ID NO: 163033 - protein, 215 aa, Heterodera glycines
MSRSHYDKIMFPPISAHGMLTLDRSKFTKSIQIPFVSVPVKCIDRVRLLSAVRAVCLERMPRLKPWHTPPNCDGSVERLLLFDPDKFGEEATNDLAQQLSQTMDSSPEFGKMAYTMEYEDWDLRRCIQSVLPDGFEFSGFEQCGHIIHLNLREHVLPFRFTIGHILLDKIPSARTVLNKVDTLTHEFRVMDAELVAREAEFMTEVVEHGLRYRLD

SEQ ID NO: 163034 - protein, 199 aa, Heterodera glycines
GVKSSELAAYLFDQLRNLSKLETPITDQTVDVIVKTLKLVGRFLENDRGPQAMAEFLALFDRSIQETTTDQLSEPAREKVRCLFNLRENKWGVVAEPNVGDGPLTTASTSVGIIGPDDVPLTEDECAFMEENLDNFVDNSPGESQCLNAFDEDNVEDDFEKFLQATAIRAAEKALEKVSIDEDDDASSIVSSHKFSTSK

SEQ ID NO: 163035 - protein, 211 aa, Heterodera glycines
MTHHLNFDQFLQVHEPQLLASGLPELFWKSLYKKISNQIFDAGKYFEVIIEESEPNETISSQVKAMSELKMDDPENVFLIDHAWTFRPNTARFALQQVDGLRKRLLDMFNIKAWYANKECLKDPFADDSADQQQKCADAVATHSADCEDSEVASPCGQNVEEIWEKHCEMDDLIIDEMWKYAMTYSIRMLNLEMDEHQIPVWYVMDEFGVR

SEQ ID NO: 163036 - protein, 214 aa, Heterodera glycines
QLNALVSKLSLTPNKMNERAEFTQQLKTFVQPYFVSPLQIRVFGSSSTGLGFVNSDLDLNLVFDEDLINCGDFARIPSVSSPENGPTLDDIDQQLTPEKLKRSPIDRDTFNRLPKIDRVRLLNRLINEFRKEKGSVTAHVPIPDARTPVVRFLTRLSSARVSCELSVQNLLGECKANLIRDLVRAETTGTLWRLIFFFKLWALCNGLFSPDPQL

SEQ ID NO: 163037 - protein, 259 aa, Heterodera glycines
MDKENKKPKGTKRSKNPEETSKQREENQNKENDDEFIHPPRRRSARLIAISKPALSSDLSASAEDFVHGKGTKTAKSEVFGTDALFGVSSASFTSPFNSYLTSSVEPIKLSSDEATVSSNRSLTKRLNATNIQNAQSLGEGTSKATLPLSSDDDGEEDEWGAMELLHTDKTEKKVIEVELDEKHSDLFKLQINPLKERDAKEAEERAKWEHEIELEIMRKRREFQEGLHRFHFLTFVAHLRFMAHSLLRNSSTLLTPFT

SEQ ID NO: 163038 - protein, 160 aa, Heterodera glycines
SMPRRPKTLNRNGGTSPVSCQGMEVELDAWAAIMNGLQGPAREAEEALFTAFIRDDRHLTEWLEDAREMLAHIAAELADEPNQPIAAGGQQPAVAVNPPVPAVPFVNNAAFLGGANVQQPAAVANHANQPPLVPNNAQIVPNPRFGRVSRVPSTVPPLSP

SEQ ID NO: 163039 - protein, 96 aa, Heterodera glycines
SAHLSLFHANFGSDQLIFRPLISPFSPIRSQFGPDRLLALPYFLCNFTLGSIRFVTFVLIPGLITSFAFFISVPISPFDQSNQPSMPISALIKSFC

SEQ ID NO: 163040 - protein, 215 aa, Heterodera glycines
MPTGSRVPLIVERRSDETEEDTWTVYPTAGICIKFKEAHFSAASSVSGPSTSKFFINLAHCTELPPPHRHAELDEDKVAQMVEEDPDAFRIPICVGELDRSAEDRSGEAVAKVDVLVNSEFFHKRISQSEFFRQLTLRIVCQAIEIKHSLRVDIGKQVILRNKKCIGELCAQRIRKRPMTTKEANGEGKVKETTDTKEEEDEEERTEVDQMLDIE

SEQ ID NO: 163041 - protein, 214 aa, Heterodera glycines
SSLRLGSQRSHAVNAVHPKREKPNYERPKSQQSTKTEQQKCWRCGQTNHHHAACPQKGYKCRKCSQNGHIELRCEAVQEWRKKNAKSWLKKNVGNVHIVTVNIGTTAKPTTKSTLLRVKVSFQGKVIEFVLDSGAEVNVINEMTYKLIGSPKIKACKEQAVLYDGSTRSFIGKGTGTFEFNGVNVEQEFYVAGKDSLNLLSIQTMDAFGLLDEL

SEQ ID NO: 163042 - protein, 83 aa, Heterodera glycines
SDVIMIFEPISDVSGVSMPGFFQNCQDQEYTYRMNLSINKIKVFSELFGGALTAKFSPAILFFTKKKIYKAQFLKIFFWPILK

SEQ ID NO: 163043 - protein, 311 aa, Heterodera glycines
MVLLGAIDQGTSSSRFLVFDSENGNLVAGHQLEVQQQFPNPGFVEMCPEQIFKTTVRCIKSTCEELNRRGIDPKKEIKAIGITNQRETTIVWDRETGCHLSNAIVWLDCRTHELCDEYIQRTSTRDKNHFKAKTGLPIHPYFCALKLRWLLNNVPEVKKSLQNGTLMFGTVDSWLMWKLIGIHATDVTNASRTLLMDLQNRKWSTEMCTFFDIPMEILPEIRSSAEIYGHLQKGPLEGIPLAGCLGDQQSALLGHGCLQAGEAKNTYGTGTFMLCNTGQRAYISKNGLLTTISYQFGQASPVCYALEGSGS

SEQ ID NO: 163044 - protein, 176 aa, Heterodera glycines
GSSHPEGALKRQWITSKTFKHCYLKFGGCTSLLTDNATAFTSDFFKSFCSLLYINKCYAIPHWSQGNAVVERSFRTFHNILAKYISSEEPDFDEFLECANFCYNTSIHSSTKETPFFLVFGRDPIFCIEQILNPNTEPENTSEVDNVKQKLVKSLRKAWESAAAVIKEAQLRKSTI

SEQ ID NO: 163045 - protein, 63 aa, Heterodera glycines; identical to SEQ ID NO: 157419

SEQ ID NO: 163046 - protein, 223 aa, Heterodera glycines
  unsure (1)..(223): unsure at all Xaa locations
MTLQWTVVAFILYAEIATIIVLLLPWVRPTMWKKVFNSRVVHKLKQFSNVYAYAFIFVLILLFVDATREVRKYSHVDTTREMVGRVAEADAVVHMRLFRAQRNLYLSGFSLLMALIISRIVTLLARCAHLELAAEAAMKQAEGAGKAAQTLLGKEGDVNSLSGEEAKKLRNRSXKEMGAKLKKAETDRDAMKAQAENLQEEYERVSQQLRTAEASHNGNKKSD

SEQ ID NO: 163047 - protein, 183 aa, Heterodera glycines
PILSGKKVSWDMATASCTDTDDQPQRKNSKGSYDYIDADECHDVVTHHSSTPFYSIRNSNSTRPSSSHHAQMSSSSSPQSRYDYLDFAGKPDQPQQHQLRRQQQRAAPQQRVAVPPPALRRAAASADEPLYATASSQIYSLGGSEDPYSSIVSIGGGYGSGSATYDQHGYSRIINSNKNGTTG

SEQ ID NO: 163048 - protein, 175 aa, Heterodera glycines
MDFGPRDDEGKPCKACFSFEDMLRMMGKKKTADRRNGEAQNKTAGDEPSTSSSPSADRRRTDCPLDKDELGRSTWNLMHSMSVYYPKEPTEQQKTAMGQTIDGISKTYPCDHCAADFRADLRAHPPLLNSRDAFARWMCEAHNRVNVKLGKERFDCSRVMERWRDGWRDGSCEKN

SEQ ID NO: 163049 - protein, 188 aa, Heterodera glycines
QVLPQFVPPFLLLILLSSACPFSLAFSSDILPSVTNSTGIGNGTDATTDPTDTTGNSDLMTSATLPEETTAKEEEGTKPGTDGTARDGQGTGEPQKDGEGMKQDTGVSAADGNGTAEPPKEGDESPQESFACSVLCWTLIIVGGVFICAVGLTAFVLLTVHYQNARADPNNPSAAVQMSAIPRGMTAH

SEQ ID NO: 163050 - protein, 197 aa, Heterodera glycines
MQETHIVLGIGTVCSLLAIIATVVTLPSLYSEMNEMSTKVHAGVEAFRVNTDSAWTDLMDVQVAVSPPSKPRANPFSSIFRAKRQLPGHCQCGPLQQPSCPPGPPGPAGAPGQPGQPGGAGQPGQPGAPGQPAAPCAPQHIPCPRCPAGPPGRPGGQGPPGQQGAPGQPGSPAPGGGQGPPGAPGPQGPSGQPGRSG

SEQ ID NO: 163051 - protein, 52 aa, Heterodera glycines
LASPPFTHRPLHPLITPPQLTPQLPSPSMSRPIFGHMSDDAFLFIYLCAPLA

SEQ ID NO: 163052 - protein, 324 aa, Heterodera glycines
NLYIATGGEDDLLTVYSLAENRVVCRGQAHKSWISEVAFDCYAPEFMLEQTQIFDEKRCCPPLKGEGTCSSFATNEGNAFQNGHHFPSGHEESVSSAPQIGHLPFANCDDLRTTNTNSLQLLPNGKVTHRNGSSDDANDVSHCQPQLLYRVGTVGHDCQLCLWDLSEDILASPPLSQHHFDEITVSPSPSNFANVSPRNTTVIPIGFANALSTTETDVRTADKPSDANSKSSGRFRKFHKRGFSFGSRLTGNERKQHGNSSNGANSNESTLKRGENYAQFLGTVQCPRLEDVPMIEPLMCKKIAHERLGALLLREDCIVTCLSG

SEQ ID NO: 163053 - protein, 195 aa, Heterodera glycines
EYQIGQLFSVAEASRQETGGGEGVQVLRNEPFEGESLFNGQFSSGQYTHKIYHFDSKVPSLLRAIMPKGSMSVHEHAWNAYPYCKTELTNPDFMKDSFFIRIETIHLNDRGTTENALCLTTDMLSKRQVVRIDIANDKEFINAADIREDTKPSTFHSERTGRGPLLQSWQTNCEPVMCAYKLVTINFQWFGFQNW

SEQ ID NO: 163054 - protein, 292 aa, Heterodera glycines
MGRKKKKPQKPWCWYCNREFEDEKILIQHQKAKHFKCHICNKKLFTGPGLAIHCMQVHKESIDKIPGALPGRDNVNIEVYGMEGLPPESTRGHVEDDSDMQPSKIPRPAFPPGMSMSGMVPPIAAYNQYTPRTPFGMPSYGMPRPGTVPLPHHQQQQQQQMAAMMAAAAAAGAGGRMPATSTAASIGAIPTPPAGIVPPPPLPAGIPSPASGGAIPMPPQAAFAAYQDKSISGGKYGTRDEPSTSAASSSTMVKTLGAKTRIVCQDEQTSLEEMMAQRIVPTYTRGLMPFVR

SEQ ID NO: 163055 - protein, 153 aa, Heterodera glycines
MDEAYFLRKFDEYERNDSWDQVFHKINVESENQAKKLSLCCDLSNTFHEKNRYRNVLPYDQNRIMLRCGVSSESDSYINASPLHLPFAHRNYILTQGPLPNTTCDFWQMIFEQEVSICIMLSKVMEKSFVKCHSYFPSKDEKKIAFNNWGMRT

SEQ ID NO: 163056 - protein, 153 aa, Heterodera glycines
EMASVTDRFLMNWKGIPLGFGLVTSTTCSYLSNKSRWLSKIRSSIAQRLLESKETKIAEQMLQQRRRNELMLHFKMASYGAPVALGTLAAGGILSSLPKILRLPNSIGFTVCGFGLSIGAFIVGALLLDGPMYAYTEWVQQRTDKGTEKQKVE

SEQ ID NO: 163057 - protein, 372 aa, Heterodera glycines
MPLPIRFFVLKICQQNGRNGKFVSLLTAALHKELSPPHFRRFFASTTSASSDDGFVVEKVENGNAKNYESIDGAWKCTNCAHLNWPQQRICKHCTIGIPTEAQMAILKQLLWVCPNCTARNTGDHCGNCALARCSVYKGFWVCSRCTWRNIPVNFSCRKCKKGKQTEEQRQLIQQQRWVCGECKHHNFKEECFSCGAPESKRLPDGVGGESLPDGSWYCVGCGFLNFPNYSKCRHCRREEPTDEQLGVIHSSRWQCAECHFDNYESNLTCHHCDAPRPTEGQLPATSDCQYWVCSSCLWRNFPTHLSCQKCIKGRAPEENRQQIQQLRWVCGICRHHNFKEDCFKCGAPKSKGFSCGIGGESLDDGSWYCVS

SEQ ID NO: 163058 - protein, 242 aa, Heterodera glycines
GTPGGEQTIDGVAVHWYSPGDYDKLTKVHNLRPNKFIFASEACTGYEVFEHKVLLGDWSRGRAYARDILNDLRNWVVGWTDWNMCLDLEGGPNLARNFVDSPIIVNASAGEFYKQPMFYAMAHFSRFVPRDSSVIGSSLFVANGGVNKLGEKKVDKSVVPNASTAASVDNSTQSTAVEHIAFQTPNGLHVLVLINSDRDAHNVSIFDQTEGRRWTVPLGGDAIVTAIWKPKNDGGKAAKNAQ

SEQ ID NO: 163059 - protein, 288 aa, Heterodera glycines
MVNFFVIFVPFLLLIVSNQLKAEETEENRHKTEETWNYEEPEEWGGKCQKGDRQSPIDIHKQWFIDYKIPAISFANYEKNGTVTMKNNGHTVVVSGFDTWEKQPNIADGGFGSKYMLSQFHFHWSQNENGSEHTVDGEHYDAELHLVHVKEGLSLSEALALSDGVAVLGIFFKRAYVGSALLALQNGLSQVTNKDDSVTIEHYEPNDLLPTASEVFFRYNGSLTTPDCNEAVIWTVFAVPKSISREQIQLLRAINGHDGKPISSNIRPVQKLSRKVQKFRYNKVSILP

SEQ ID NO: 163060 - protein, 263 aa, Heterodera glycines
MVRMADVSQDDILVVEGAIDNDQTLKNLVERTYNKFGQIDVLVNNAGSILQHQRSRQNSNSNNSTSSNNYGYDYTNGQNGAEEEDGGRGRYHGFRGFRRTSSSATAMTSRRTCSIFGALDNDFDFLFNINLKSIAKLTRLCAPYLEETKGAVVNISSFGTQRSLSDYTYYSTIKNALDNYCRSIAVKFAKRDIRVNNINPGFIIGETLDEDDNRANKFELNWIKNHVPMGRGGTAEEIGKVVAFLASDDASYITGATITVDGA

SEQ ID NO: 163061 - protein, 263 aa, Heterodera glycines
MPPTWALVPLLLLFFVHFIDVGFARRYKASTKYNPPAEETTTETTELTTPTECPAPVCPCECPTEETSETPPSTGGGGGTDDIVTSPEGEETTTPVSGCVPGPPGPPGPPGPAGQKGPQGKCGDNASKRKREAAAVPKEFMTNLEPNVPVKRAKEGEAVAKTHFARGHVKGGCPPGPPGEPGTPGPPGPPGDPAPCPKHMKSEAQSVDGKQLANRNKRGETVLNAAKEGTEVRPIVRHGIGPPGPAGPPGKAGEKGEPGPCEW

SEQ ID NO: 163062 - protein, 209 aa, Heterodera glycines
FFVHFLRFFSVISLYFNVLLVLLVLLVHLFRRYSGRLVAAVLQRLLHARAAHIYGLGWFALRHGELLLANGLHLEVRELRVHSLFNWWWTTTAPTVDSAANDGGGQRMALNVRVSVGTIRVGKQLADEEGSRNATSSICDGQNPLIENCGVLDSVSIHLSRPGPGQLHLQVQLQQPVELVWSPVLHLMVNDVVRASRLPNVPIGQLFRL

SEQ ID NO: 163063 - protein, 207 aa, Heterodera glycines
MSMDELKKRAKAIGTFEELRKIIDIRGVNRYNPNNAPVLERAVDLMIKETKYDKDILMTLLKLYQLNPFLYNEKYVCLVLLKTMTNFPRNDFALAKYLVDAAKVNAPELRRVCQIGSLLESCNFALFWRLVDGRYKPRDSLDEPFKKPDEIRQLVESVTSFKEATRNYACQVINVTFQRIHKQQLVNLLGGIDDAQLTAYTNLPSNK

SEQ ID NO: 163064 - protein, 99 aa, Heterodera glycines
MDDIKAQLHVALSKNGYGQPEYRYFCETDGRQYFRCECSVKRYEDIYVANEIAQKKRDAQTKAATSMGKWMVKNGFLTDEELPQLMQKSDHASEKDESA

SEQ ID NO: 163065 - protein, 127 aa, Heterodera glycines
MDNNSVDPITKQLLKICVELLQQVQQQQTVISEQDLQLQHFKQQKMMEEAIQDHERRRSVVVMGLPESQKQKPSERVAEDRTAISGVLDELGIESPITVYRMGSPDQANTGQNRPRLMKVIFGCSKY

SEQ ID NO: 163066 - protein, 214 aa, Heterodera glycines
RMFVPKSLWPSIQKGLAELASQTKMGDVRDPSIFMSAVIDAKAFKRINDYIAYAKGAGVKKDGTRLVFGGKCDDSRGWFIEPTCVEVDNISSLLLKQEIFGPFIAVYVYNDVDAGQLVRSLKDQTPFGLTGAVFSQDKDFLYEAKDILRDAVGNLYLNDKCTGSVVGQQPFGGARQSGTNDKAGGPHYVLRWTSAQVIKESFGPLTEWRYPHMD

SEQ ID NO: 163067 - protein, 160 aa, Heterodera glycines
RKRGIEYRKKRGIEYRNDSFIILWKLLLVRGINSNILKSGSNNNNNNGKRRNFRHYVRALDTDVAFNKKFRLMNAKSTFMIQTLPSNPESLLRVIFGHCIQSSLDEAQRRGIEPSRLTATITSQLLDPDIWIPIRQITPNTVDTILNRFLDVAQSKSREG

SEQ ID NO: 163068 - protein, 88 aa, Heterodera glycines
LLQLPKKSVRRQLLHFFSLHFTNKIIHRSIFRIYSLNISTKFTHPQNAPQLAPHSCNKFVRNLLIQPAVRSRENYFIEKMLLSFHKKM

SEQ ID NO: 163069 - protein, 233 aa, Heterodera glycines
LNSFQSQWRQLVAQSSSPLQFQLEMSNLNYSPIKFNARFLVINSSANNKRQTNEKFAFDEEIADGFQIATADDSLLIEVVLYNISNVPLRFEYCSLTLDEILNSSGAKKSKTLSEWSTAGNSSKNSTLVLVPKRPSRVFFIYKTTFATSLKQLMQLPASKAPTSRCQSPLMDEQNAKEILITVRHFSLRTLSGSLSWDIDHRSTSNRHHQNSIEEMDKNNYAVKCDHNGAMCY

SEQ ID NO: 163070 - protein, 288 aa, Heterodera glycines
PSETTPEMHETFFKQLAKTHHPHLADDRPQYTIQYQTDSPINIRALVYVPTKRVSHLEFAADSQRDIAISLYNQRVLIKPNAKELVPHYLRFLIGVVDSEDVPLNLSREMLQTDLILEKIRKTLTERCVRFFLSQLSKDRVKYNDFYMGYSMFFKEGVVTEQSNTTKEEIAQLLLFESSSFRSGTLTTLSEYVERMQSDQKNIYYIYAPSRQLAETSPYFELFKDKYEVLFLSDPADELVFLSMPQFRMKSLQSLEKWTKEEGLSIDSDKESSAELMRDSSKKEFLWL

SEQ ID NO: 163071 - protein, 197 aa, Heterodera glycines
QVKCPAGTTKFKLKGGLAFIPKQQQFGFSQRDSASGHIEPGSTFTLTMPNWGFDPFPLLRLLSTGQWLLIAVASEIIALAALFVFIKFNPHFRLYRSLAALAFVALIGKGEAVGTGFNSRLITNSDISSIHPTISSLRPTFSPKFSHFFTSLIYSKIVGPKTTGQQQKTAFPFINNSDLDKNLCPSNKRRATGDVYP

SEQ ID NO: 163072 - protein, 374 aa, Heterodera glycines
VIFREGDPGQSWFVVLRGTLEVKSSGKRHSFLHEGDDFGKLALLNSCEMNGNSQKQQQNNGNRTQRQSTVITAEDGCQLLRVYATKFSRLLSEMETNTVRLKEYMECDNGTTERPLDVLVLQRDAGGGRHSLIAGLPSQILEYTLETRMDHLVTMVDESFVVLSRLGTRSSSTNALQPAADSLLLDVLFSLPFWMPSNELCNMLKLYYSFGFSNSIEQNVQTIGGDPSEWSRTANTATKRRTVAFVSAWQMAIGHRFFLDSVANAFVEELFSSLLEDVRTAEETTEAMEFEEMMRQMETLMEFREGFMRKLSRHPRVVLDKGKYGDGASAPDPILPRDLCIQPIHLMNASDHSKRSIILQLRMDKSAAEIAQMA

SEQ ID NO: 163073 - protein, 237 aa, Heterodera glycines
MLMPQRQLRLVSKSLLFVHGAGAKQFLQGLTTKDMDSLNNVPLVYSFLLNVRGRILADFFIYRGNNGGNAEAFVLETEKSQAELLEKTLKLYRLRKQIGIEPLLDKTVLFRFDAEGETTQKQKATIPENSSNWMVDPRVPGFGFRAIRKIENETAHDDEASSSAYLRHRLAWGLAEGTEMVDQIPLNMNGDITGGISFEKGCYIGQELVARTHFTGIVRRRLMPFRPIDDKNGRDGF

SEQ ID NO: 163074 - protein, 188 aa, Heterodera glycines
DFATKGKKRDIILDVNGESLVNARHDEAVRALKQAGKMVNLQVQYRRDLHLRRENMLHRLSWEESRVGASSAGPTVNGQSAGEALRSFGLKLAFVTRNPLEEEDPENRTIEIRSHSARHILTLRCSSATEADAWFEAIHSCADTLLTQALAQVNLILGQSPQVLRMGWMAEQDAAIGWKAVFVALTVN

SEQ ID NO: 163075 - protein, 170 aa, Heterodera glycines
ANGAAAQAQAVAVEQPAATATAQPSQAVTATTTTTTAAEVQQTEQPTAAIQHQQQQHKSVGQMLLKLLPCNCSSIGSGGSVGWGGGRSTVYSRVSTPPLEKGLPLFGVVVQLKGIKIRVGRRAGPMDGEESGIGKEIPRPKFCREWLEKFKNGAPQNVVGRNVVGRLFEP

SEQ ID NO: 163076 - protein, 96 aa, Heterodera glycines; identical to SEQ ID NO: 135751

SEQ ID NO: 163077 - protein, 130 aa, Heterodera glycines
TSANYRRARVWRYSEPPGSLVGVGLQVAKVPRCCTGCANPRALGYLPIGQKRLGLLSCGSSISVELDSSSRIWRKITGRYFVKPKNGRAEWHGQTHFGVSSGASVCYPAAPRRSCHNEPEGEWPWRLQPH

SEQ ID NO: 163078 - protein, 323 aa, Heterodera glycines
MPKSKIQSASILAEQQKSVFSCQPTIPAADESDDLSNSSHLNCCQPISEIEQHQINDLRQILETQLLKQEVDEAYLLRWLRSKEGKFDEAADGIRKDLVFRKAWGLDKIVNWEAPEILEKYCGYGFLSDHDGNPILMSLLGNTDVEGMLRSVQSKDYIKFSLAAIEKGITLCRERALQTGRPFEQMMLVFDLDHISSAHYSSKQVASSFTTLVLLFQEHFPLVLRKILVIRAPEMGRIAFNSMTPFLSNAIKSMIEMPSEEGWQSALSKYVNLDAWPVHWGGRMMDPNGDPKCPSKIRYGLGPVPDSFFVDPSQAMPDYDPLT

SEQ ID NO: 163079 - protein, 192 aa, Heterodera glycines
MFKQLNEAEVARAMISRYWRDLYERAECDVVIVGAGSAGLSCAYCLATRHPHLSIAIIEANVAPGGGAWLGGQLMSAMVVDKEMEPFLDELAVPYEEGGPNFVVVPHAALFTATLLAKVLAQPNVKLFNATAVEDLIIKRQQQSETGEGPGKSVQQQQHVVGVVTNWTLVALNHHSQSCMDPSTVMAKVVIS

SEQ ID NO: 163080 - protein, 161 aa, Heterodera glycines
NFALTNVKSSNVRPFFDSPLFLLMLLLLCLLLSVFFIAFYRPFPVLSPPPGVPFLPKHHSHTNSFSSNFPKCPKHHSQPIHSLLTFQNVPNTTATPIHSLLTFQNVTACNEFPSLPFPSSFRVRKQSTNCRWRTPKFHNGRTNLTLKWHCTTRRWRTCTTT

SEQ ID NO: 163081 - protein, 184 aa, Heterodera glycines
SICFSPSPQRFLDTRAFQIWRSWARRVPGRVLFFVADGTVLSARVRAARMPVVVLRGVDDAYPPQKKAFAMLRWMFDNQLSNFHWFLRADDDLYIRTDQLKQFLIGMDPDRAHFIGQAGLGNSLEYGQLSLGAQDNYCMGGPGVLLSRETLRQLGPHLENCLRHLVTSHQDLELGRCVRSDVTW

SEQ ID NO: 163082 - protein, 296 aa, Heterodera glycines
MSSVSAGGDGKTPAGHTIPPPKTSGAATGGQQLSASANQFVDKIDPFSKRGNSRRRRRLIGSSRYHADNEPDLTQLPLIKDAGQADQTYLAIQKLQQCQKIFDFYDPVSQLKSKEIKRAALNELIDYITATKGAVCEPLYPEIIKMVSKNIFRVLPPSDNSEFDPEEDEPTLEVSWPHLQLVYELFLRFLESTDFQASIGKKYIDQRFVLQLLELFDSEDPRERDFLKTILHRIYGKFLGLRAFIRKQINYMFLSFVFETESFNGVGELLEILGSIINGFALPLKQEHKVFLVKVL

SEQ ID NO: 163083 - protein, 267 aa, Heterodera glycines
VISASSDTTVKVWHTRRNGACLSTLKTHKDCVRCLAYARWPTELVASAGLDKCIYLWDVNTLTKVTATNNTVTTSSLRGTKNSIYSLAMNECGTVIIAGSTENLLRVWDPRTCQKVAKLRGHNENIRAISVNRDGTLCLSGSSDGTVKLWSIGQQRCIGTIRCHSDSVWALQTDSVFATVFSGGRDHRVFRTPLRNLNDSELLFTEGKPVQKLLMVDTDQPKHLWTATWDSSIRRWPIDGKETERTEEGPRVNMTLQGAPSIRKYAV

SEQ ID NO: 163084 - protein, 268 aa, Heterodera glycines
DISSSQLKIFSVFLLFIDFVFPNNHENFVTLAQFRAGGEKFSFAERRFLLYDVNPGEGFNLRRDVYLRVANTVRQLREKGFDFVLVLPPWGNCWHWRTKPRQTKIRWSELFDLDSLSDFVPVIEFDEFLEAQGTSVSTVLYLQHYAEGWAEGGEYTLKYDIRPCIEADKYYAKRGDKWNGHFFDYADHFHAKDLQCLSIQGQSSTLAEAIAQLFPEGRSLMVDRAETILHDQFGDHFFWKARKSMRYAKRLRSIGDTFRADQLANTSD

SEQ ID NO: 163085 - protein, 187 aa, Heterodera glycines
MVAAPDEAQFHISFYTDEEECKNLLPAESINVPASSHSDQLNVLINQIGSMNDDSWKPVQFDFLLHSVLLRCSLLELVEQQQLSLENVLRIECIRQSPAPRPTAELNEAQWVADLRTLSHNCVLSVNFAGLLNVWELAGEWTRAVVKQLDDEPLKCVDTFTQDDGTTFALSGGQNQTLTLVRLRAQN

SEQ ID NO: 163086 - protein, 184 aa, Heterodera glycines
MTLPPTLFAFDQMPTLDPAIPTQSPHLAPSSDSCVGQCALIFTDQMRSQLGSEHSTGLLNLNYNEFLAAFSNSSFFDSFCNIYHQFNFCYTKCPQGFMQELLSRSAEIVDHFCVWNYKEIKTKFGCLVALDREMSKKCLHSCAGHHKAVTSLMQNFKHLAMNSDPTEAEKYLGESCEYVGCTLH

SEQ ID NO: 163087 - protein, 423 aa, Heterodera glycines
  unsure (1)..(423): unsure at all Xaa locations
RHKLMGDLDDAQVDVERAAAYAGALEKKQKGFDKIIDEWRKKCDDLAAELDASQRDARNLATDLFKAKTVQDELAEALEGTRRENKSLAQEIKDLTDQLSEGGRSVHELQKIVRRLEVEKEEIQHALDEAEAALEAEESKVLRAQVEVSQIRSEIEKRIQEKEEEFENTRKNHQRALESMQATLEAESPGKQEALRIKKKLESDINEVEIALDHANKAYADAQKTIKKHQEQIRELQLQVEDEXRQRDELREQFLNSEKRNQILQSEKEELMHQAEQAERARRAAEADLIELREAVNDLSNQVNSLNGYKRTLEGELRALHAELDETLTELKNADELXQNASADAARLAGGLRQRTAHSQHVDRLRKXLGLPNHEMHSALEPAEGAAIKAGKXIAQLKERIRTLXQGLDGMPSRPPETGQNFR

SEQ ID NO: 163088 - protein, 242 aa, Heterodera glycines
NAFPFCASIHTAEAFSRPTIFSFSSVIGKMLSTYALFYPTIICYIFCFRIWVATASTASYRTAGPKTKVPDKNEWMKRCAAEYERKYCVETDTKLKQQTTKNKEKKKQQQQQDESPEEYYPTNYEPAFNYDKLHVSDITLPLTIHQKDKYQAQNGPTKYEPKAEGQHVTSSVTTAEAGKYSSSSGHASSSESEEEDRWEEPRKRSRNRERDERNGRHGEGEDKAAKRWYKSDESKEEKRDGK

SEQ ID NO: 163089 - protein, 552 aa, Heterodera glycines
  unsure (1)..(552): unsure at all Xaa locations
MTNFGFPPSPTFHTVRLREGGTITVFRDVANDEFRRRRPSEFAAQIAESKSAKDDCRPFFVMNIDCAVALLELWAQFLPRVQPFYALNCNADPMLLRLMASHQSVGFSCSSGAEMLNALHYVSADRVFGAFPCWTRSALRQAETCGVYTLCFDSERDLDRILANHSNARLLLRICVDPCATDANALFGAPLDEAVELLKLCVQLGLNCIGISLSTGPSTDDNCNLSSSSLFHFSSVYAFAIECSARLFRIAIDLGLRMDVLNIGDAFACPWSSXSTETDESLAHFAEFCTEFNRSFDVHFPSDGIGHGLRIMATPGQFFARSPFSWVTNVIGKRSTDASAVTNNDFDAGKTAFHYQTNESYYGTFGCRMMVNTEPRCAPLFNDFDMDTEQNQCFYYGTVFGQSGFDDGSDTDIVQSVCHFRQLNIGDWLIWSNMGAYSFGNCGSLDDEINDDDDSDGNEFDTLKTPPIFYFASQGNWESVCHKFDFAFLDEHQQQRRAGPLFASSADEYLSDSDSDGSVGEAMVHSDTEETDGGGTEKYEFWPVGWPTKFND

SEQ ID NO: 163090 - protein, 48 aa, Heterodera glycines
  unsure (1)..(48): unsure at all Xaa locations
YLPTPGSKNIAILPRRDSDLEAFSHNPSDGSFAPLVYRPSTXTKCLNL

SEQ ID NO: 163091 - protein, 176 aa, Heterodera glycines
EYPPQMGEDVTQVVYSTPLYKFFKYAENRDVAKRVMKDRELKKIRLGIEGYPTHKEKIKRRFNRSEVVYNYVQRPFLHCSWEKEEARSRHVDFACPIVKSKSNPSLASAASDPLPQPAPLQNNINNGWAAENGAGEHSANFQQRPTNDNDGSSGNENERQPLRSPPANVQNSAADD

SEQ ID NO: 163092 - protein, 54 aa, Heterodera glycines
VSDGWNVIFDGIGWEDGILSQFLILRFFLVGRITFSTPKVCHIFEQGCKLELFF

SEQ ID NO: 163093 - protein, 280 aa, Heterodera glycines
STASLSVAPCPSNLVFCTPIDGTVMNFLQICTVEFQAVGASFAKHCICSTQSNLRLTNRSNAFDALAVLYPWEYVSEAIRKAAAKSGWSLGMRMVRPELAERKTIFSKALTTRRRRPKKGCWATRFLSLFWSTSTEVLATFVTSAFGTDELPTCSVVRCPHPLSSMSQRFSSVPFPSVAVPSFSSSELSSHGGRNASTRLFELGFFFDGLTPCEGGRGPTKSFRVLAVNPKSGGCPQRKVFESLPDVFDSSCHLCPKFAFFCCLLDILRGFSLDYLKNRN

SEQ ID NO: 163094 - protein, 198 aa, Heterodera glycines
PPYPSAMSNSLYRSPSTAGGALYKSPSMSAFAGGAPFGAMSVADLGSLTRLEDKIRLLQEDLESERELRNRIERERADLSVQLIALTDRLDDAEGTTDQQIEANRKREAELQKLRKLLEESQLEAEDALNVLRKKHNDACLDYNEQIEGLQKKNAKIDRERQRLQHEVIELTATIDQVQKEKHAAEKAAERFEGQAID

SEQ ID NO: 163095 - protein, 256 aa, Heterodera glycines
RIQRDAQVHFGCVRSGKLRAFGRQSCELWQFSWHFSCHQFICLENHSIETHCFHLVPHPKVFLTVHDVGKTYLSCVDLANSPTLSPLVGQRAVFLHVSVPGQAPGAENFVGDFPSMEQLGDGLSQVMEQFNLSKCIAIGEGAGADIVCRFAMSFPQLVVGAVLVHCISTTHGIIASIKELFTNLLLNDGEMTHSAWNWLLVHKFGNHEMDKEKRNYVDAIKAGGMNEYNLSRYLYAFSHRDELTDRLKDQLGKVDV

SEQ ID NO: 163096 - protein, 275 aa, Heterodera glycines
MTENEDKKAGTRVFKKTSPNGKITTYLGKRDFLDRGETVDLIDGMVLIDDDYIKSSKKVTVQLLAAFRYGREDLDVLGLTFRKDLISQLYQVYPATQNESLRPMTRLQERLKKKLGENAFPFWFEIPPNSASSVTLQPAQGDTGKPCGVDYEIKTMVGGDSTQEKPKKHNSVRLAIRKLTYCPQLERIQPMVDVTKNFIISPGGLHLEASLDKEMYYHGESIAVNVHIQNNSNKTVKKIKVTVQQMADICIFTTARYTCDVDKIDSCEGFPVGPG

SEQ ID NO: 163097 - protein, 330 aa, Heterodera glycines
  unsure (1)..(330): unsure at all Xaa locations
MLSRMLSSAVAVPRMCESNKKLLRKGATFVGLLCGRMANSTFTATVTPPHRLLRPLHINEKKLFGPGPSNMPPLVQEGLVQPLLGHMHPEFFEIMDDVKAGIKYIFQTENALTFAVSGTGHAGMECAILNLLEPGQTILVVQNGVWGLRAANLAERLGIKVHRLVVPEGEVINLDDFAEAVDNYRPQVAFVCHGESSTGVVHPLERFGDICNAYDVLFLVDTVASICGAPFHADALKVDCVYAATQKVLNCPPGLAPISFSEKALEKITKRKTRVPSFYFDALELGNYRGCFDEARRYHAAAAISGVCARREGLTVGAQXGIGHIGEAHR

SEQ ID NO: 163098 - protein, 194 aa, Heterodera glycines
MGHLLSMDSHIRWPECKTPGPHLRSQEMKLPSNIGQKKLSNIGLVVTTRKIASIGLEYPHAYEEIVKQYNDFRSHIVLLQDLKTALHNTELELDQLAAQMPADKECPIIEPRFRVSSTFYEELERSPVRVLNTPMTEGGKGKGKGKQQLKPAPVTGRAITKMIEVNTAPTTVTRKRRMHYPEGTPPTRSQTAIH

SEQ ID NO: 163099 - protein, 158 aa, Heterodera glycines
GIPGNFSVLENRICLQLIPCRKCHYQKTGHCTIGERRLSICQFNAGGRARSRAGAGTTVEEQPKCSNGGRQVPIVAKFDREKDAQIHTLGRQIRAEHLSGFVDQRLLLWLRLWDECVFEKRGGKKWEGNHRRISQRNNANATSLWDNLEERDRTLRNV

SEQ ID NO: 163100 - protein, 232 aa, Heterodera glycines
  unsure (1)..(232): unsure at all Xaa locations
MPSNAQKADKTMANGKQQTIGEKQPEHKRRVMRHRHIRLKPNILNSSAAANASMKRHPQPNFDTIEVLEEEHEFEVPINEEEMMRFPGMEEGSQKSDKISVHRRFWQLNWKGVHFSGLPTWLQDNEFLHFGHRPPLPSFGSCFNSIFSLHTETGNILTHMYGAIAFIGIFIWFLVQAEDVVSWPDKLIFSSFFVGAILCMGMSFAFHTVQYHFEDINKLVXKLDYSTCAYYH

SEQ ID NO: 163101 - protein, 140 aa, Heterodera glycines
KSTFFYFWVGAQTTPGPKNHNDGFLNNDLAPFQFPMDFFKIFRPTAGPRWSRSTRDSSPRWSPPCPRSSRASVSVVLLALALVVSLLRPAPNRRLLLLLRIISNFRLLTVVVVNTQLLLFPVVFSTHFCCPFSTRFSFCF

SEQ ID NO: 163102 - protein, 579 aa, Heterodera glycines
  unsure (1)..(579): unsure at all Xaa locations
NQEPVTKRGFCQFVLDPIFKVFDAVMNIKKDEVAKLVEKLNIKLTLEEKEQEGKPLLKTMMRKWLPAGDTMLQMIVMHLPSPVTAQRYRMEMLYEGPHDDEAAVAMKNCDPNGPLMMYISKMVPTSDKGRFYAFGRVFAGRVATGMKARIQGPNYVVGKKEDLYEKTIQRTILMMGRYIEPIEDIPAGNIAGLVGVDQYLVKGGTITTYKDAHNMRVMKFSVSPVVRVAVEPKNAGDLPKLVEGLKRLAKSDPMVQCIFEESGEHIIAGAGELHLEICLKDLEEDHACIPLKKSDPVVSYRETVTEESEIVCLSKSPNKHNRLFCKARPLPDGLPEAIERGDVNPTDDPKNRAKILTEKFEMDATDSRKIWCFGPEGTGANLLIDVTKGVQYLNEIKDSVVAGFQWATKEGVLCDENMRGVRFDIHDVTLHADAIHRGGGQIIPTARRVFYASVLTAKPRLLEPVYLVEIQCPEAAVGGIYGVLNRRRGVVFEESQIAGTPMFIVKAHLPVNESFGFTADLRSNTGGQAFPQCVFDHWQVLPGDPFDGTSRPGQVVTETXKRKGLKEGIPSLDNFYDKL

SEQ ID NO: 163103 - protein, 215 aa, Heterodera glycines
GGDAVPLPSAVADSPFLEVDLNRTLTPQSQWTNESTGTMHPIVDTEPNPIRDAHEPNHIFHYSPSSHSPDDDESSQNGQSSSSQSAPISSALDASLTNLYKEKENDECDDERSMPRRASERTLDRFEDVRTIASSDIEVIRQMDDWSVTSSYPNSSHQQSNTQKIGQIRSIGELQQSQTPPELTTKLDTSEQSQREMDEKIAVLMAKLAHRDQKI

SEQ ID NO: 163104 - protein, 183 aa, Heterodera glycines
MKIRQMSSSSDDENELQLSDTDCEAGPSSRKKSKAPKSQTHHRKWGPKASSLEEEDDEDEETLVEREVERTETGRPLRKAAVNMRKKLKEELQYEEEEDEGEETEQRDEEEEGTAAGAQIGRLADRAVSALARPQRTVGNRSEEGDADEFKPDEEDEAEADEEEEEAEKEEEVEESDEEGEEE

SEQ ID NO: 163105 - protein, 227 aa, Heterodera glycines
ERLFLKMGRRRKTAPALLRNKRTRIDEDEMDEEEEGAWNGHGHQNMGLRPRKQIQRTISAQWAPRLRERHQNGQNTTEDQLADMELEDVDMDEDEIVKTLNMVFTNLDLSQLPALSPGAGLYAMANYAIEEKSIPKRKAAEKKVPEDVLEPTFLSLEQAMQRDQNFKGKLLDAFLEDFREYFQTYFSRPNSQTFDKDLCVRFLLQHFPFCRVPLIERLADEFAGRYA

SEQ ID NO: 163106 - protein, 185 aa, Heterodera glycines
MHHVETGTAPPVKMRVRPVPYAFREKVATMLQDYLDRGLIRPSWSPYASPIVLVPKKDGTIRFCVDYRGLNAITVKDAFPLPNIDNTLMMLGNKKVFSTMDFMSGYWQIKMHPDSVSKSAFTTEFGLYEYLVMPFGMSNAVATFQRFMTRLFDGILNDFVFIYIDDILVASESFEKHLEHLQAVF

SEQ ID NO: 163107 - protein, 192 aa, Heterodera glycines
  unsure (1)..(192): unsure at all Xaa locations
IYILDANGDKQPIHVFESLHQHPVILMQYTAAFDVAISFDEIGMVEYWSGSRNEFSFPKTVNFEFKTDTDLYEFCKIKQMPKALAISPDGRTFAVWXSNSYIYIFDLRSGKIIKKLDETLQRYIEMGKETKGNGLPAIEWNRRVALEKEMSRDPNALRFISITYDASSNFLIFPTPLGITVYNLVSDQVARR

SEQ ID NO: 163108 - protein, 216 aa, Heterodera glycines
VKQQERISFPFSVDSKRFLLLPTDFVDEKSKFFNRQFLTIYRARINCLKDLIKKNARNILASTSNNSVQIDDLSNFSAGNDILLIGVVFKKMKFRQSILYEFSDDSNVPIKMGRKAGDNLCDDEDILQLEDDQQTVKLLGNIDKHCFVTGDVIGVIGCQEDVSDNFEVRRIIYPEMSPQLEWPLVEHDCYIVFMSGISLVGNFDNDVQTFSALMQF

SEQ ID NO: 163109 - protein, 213 aa, Heterodera glycines
LNESTSPIGGSTSSKMSSSFNQSSSYNRTFERKVIEESTPTMTTRMFTSSPLNTIKTTLGSGFPSDLGGLGTGTGTTFVQPHNYQFGTATSGSFHSSDDSLSVSMDCAMFAPEELKVSVVGNQIVVEGKHGEKQDSLGSIERQFVRKFAMPRNATADSVNSNLTSDGMLTVTASAPKAKDNSPIRTIPVKIVTTSAGGQTPQEWGRPISTKWQ

SEQ ID NO: 163110 - protein, 47 aa, Heterodera glycines; identical to SEQ ID NO: 127360

SEQ ID NO: 163111 - protein, 150 aa, Heterodera glycines
GRHNKHTLIKIVPNLVYLPGRKPARLIALRSVPTPYIPPNGYSARLAHFIPFPSPSPRRVRRKFLVATTFFAYQIFAINAHLFKKYSILLKCSVFCYILRIAVHLKESVIEQISQISRKVQAVAVKIVYIKTMAIRISALGPFSKLMCFY

SEQ ID NO: 163112 - protein, 289 aa, Heterodera glycines
SLSSDIMPFLFPSIVTTNNTAFNRINDKSANVRQKLDMMETALVHLTTNKCQLNFSAEKTRSDIRRATDKHISMLRERELKLFEEVDHIHQREQQLIEEQMEQLNQAIGTSKFVVEKMAAFADEKNLEELISVELDQKINLLDKLANSSKGTNIVFSAAFQQNIPLGQIYVGFAGGSASPQANANDGVSSVASDQRLHFENGSEISFDQFVNSALRGETSVKGGTDQANNHLANCAANGVKREMLVPDATFMDKLRVAIRNIIQESPPNSKWNTFSRIRQNLYFDIICQ

SEQ ID NO: 163113 - protein, 289 aa, Heterodera glycines
MPRRRTMEGLDMKWQFRSVTSSRKGTQWKVRWERKRRKKRRDKTTAQCDRLPTKLGELSLDEDKTANTDAVVEPPMATEEKAADVGNDKPSGENLNEENNESKGYQSPVSEEEHPIQHVDAKQPTVDEGQTHAAAADSLPPSEPTTDSSAENDGNNEIVSPTALEPQLVPTSDEEEQKPKNAVEAGDDGAAKDNTLSSGGATASDETAAVAAFSAGTPPPVPAVGQQPQQQTEHQLSQHQQQAELCGAKTAVAAESTARDSAEDETDASSSARQSVPAKGGTDGKAHGG

SEQ ID NO: 163114 - protein, 199 aa, Heterodera glycines
MHTTAAPPPHQPSVVMSAIDDNNSVRFPIIQVEVKIRVPDHLVGRLIGKSGICVKKIMEDTQSHISISESRSQQEVNQYQTPELLDRIITIRGTAFGSVMAAEKQVQQKLRHIQEQDMNISGGGGGVSAASGRQFCPTPVPAPPGGILQSMDGGGGAAIGSYIAPSAVTVTGAPMLSRGPPDNAFHHHPPTAAAMYSAQ

SEQ ID NO: 163115 - protein, 211 aa, Heterodera glycines
LLKTFDPLQISAKMLHSFRGVRLSSHTNNTFEFSSSFSSSTSTTTKRTKSSNSNEDGRTPTNGKNLSPKKRNHSQQRQQQNDSKKSALSTDLGLKSVVVQRKLNIQTNYSLRAVRKKITASNELVVEQDEGVAKAKPPNEHRYKRAAKDENENDAFGEDDGDENDYDGGEDEHGIWLNWRAKKRDNQSNKLGGGQNSQIGTERGSAQARLM

SEQ ID NO: 163116 - protein, 83 aa, Heterodera glycines
MFKNIFFFFLIVAPFIAAYKPSCKCPENEQPGQLSCNGCEPSCDNRKPEVCTKMACECSCDCVPGLLRDKKTKKCVPKEKCPY

SEQ ID NO: 163117 - protein, 166 aa, Heterodera glycines
MATKNGRIPYELLFELISALPFHIRWAVTRVSKAFDGFVWQKQFSWVRAELIRKEAQRQKEGGAFLQMVDSLSTAVNSLSEASHSLSQASHSLSNSAAQEMHKKNKSWFNFFTKQVYSMRDEINTMTAEAQNADKEDGGNAGEGGDAAGGNGADKKGARKRHHGER

SEQ ID NO: 163118 - protein, 144 aa, Heterodera glycines
RHELMLLRMSDVISNGLGNHRPDNAFCSIDAATLCRNLIRFAYQLSAAKRRTLEDPELYRMRTHSKTEERLRRKVVRDMIMEMPGKLDHASVVAYKVGKWPRHAESHSLRRRVTEWEGGMELDGVFMERHGYREPNDEDDGGAR

SEQ ID NO: 163119 - protein, 412 aa, Heterodera glycines
MIPDSAYIEIMKNCSKWNSRTMGGRTRSQTAVFDQQTGIVHRPTEHLFRHPSERCRAQNPMQVFTYPPVRWVKPKNNPSAGIEMNYFMRANPSLKSAISSSVEQPQNASSGEQQIAEAQQQIGTNVPSVRSATGGSGTKSYIENELDLAEYDLDELETNDQSDEEDWGASRKKRKKTGPGFGGNVPGRTARKVPSNISSATAKKEQPTDNGSNGGTPTAANVIGGGAGVATTATETRPYVCQLCGAKYKSRPGLAYHKLHVHQSDSNNETPKSPIISPKVQVSEYCDFCLGTNLQNAEGEAEPLISCHDCGRSGHPTCLKFTKNMLVSTKRYGWQCIECKSCAICGTSENDDQLLFCDDCDRGFHLYCLKPPLKEAPETDWSCHLCVKEFGAEASIAKATKSTEDGTSSPAK

SEQ ID NO: 163120 - protein, 191 aa, Heterodera glycines
FNEVGSRDALFLLSVLQLHLTISVNIATIITPKFMISSDSHRRALGDIAGMGVSGRAHPSLAKMRENLINGTIDFQEVPIIDMNPEDIRAELKRVYTQLRMYKLKNAYQDNPHISKRKGGGAVKKSAAGDATVSGRLSSGAGLSGAGLPKGVRGTEGYCAVKRNSIPREATPNAVTSPKQLHGADRPPPLV

SEQ ID NO: 163121 - protein, 44 aa, Heterodera glycines
YTHIRLPLMSLTNCKMGLSACCLLLGNLNFCIHSNSNATRKWVI

SEQ ID NO: 163122 - protein, 195 aa, Heterodera glycines
MLKSAVLFLLNLFYPFANFCLDLLPNSSPMGSKSTPATADVAYANYRLFDELNRKVRESLRKAIEADETRIAKSRVIGLYENVLKQINKALEIRHTSCPSHKQTEMQEQQKKLKAFVGQTKDRLEKLASIEPMALRATPLPLATVETGNNRARRMPCTSTDQRLVSNRQNLSKMSLLKSVDSKLGDEILATIVET

SEQ ID NO: 163123 - protein, 346 aa, Heterodera glycines
LKVSVVGLERALEQYTSAAHFDAPFDLKQVPLSTEPLTASTDEVKKKAAMVDDASAAMKKQKEEKKSGTSRQEQFALQFASMPEFAACGALFKSCAAVELTETITEYNVSCVKHIFNDDFVLLQFDCRNTLNDQLLEEVFVEIEPQDEGEDCPWHVQSVHPLAQLPFGQPCTTYVLLKMPEDGRIAGTFGAKLKFKICDVDPATGEPESNDLYDEVYTLEPIEVGLADFLLATAPKGASFTTAWDALKEEGHETEESYALSNVHTLEDAVSKLLKCTALFPCEHSNRVPEGKSSHQLLLCGIFRGGIDVLCRVRLVMDPSDQTVSMNMVVRSMDETVSQMIANIVS

SEQ ID NO: 163124 - protein, 180 aa, Heterodera glycines
RPRVHHRTVLSSLSLLLNINNNNSSSSRRCRRRRTVLLRLLFLVRVPPLPSLRLPLFLRQHLQQFHQQQLNNSNNNHRHQRSRIITVTISPSSSSSRNQPLRSLSLHSCDTLVNVPVKMGMPWCKSLSNSLLFLSNSVHWLLNSLIILWQLRARMCKFGERERPTEKECLADLFLRYFIH

SEQ ID NO: 163125 - protein, 174 aa, Heterodera glycines
MNQFLLNLSSSYSQWISKAFASTGKGRWYAQPLDEMSRHRSRPPCYGMARRSKVLCVDNSEIAKEANMSGKLAYVIWVYKDGYRKRHMPKAELGDRVLLSIRGEMKRAVVVGCKQHLAIRKHGLPSTDTNNVVLLNNDGNPLGNRILAPVPAYFMRYRKWLHASKVSALVKKFV

SEQ ID NO: 163126 - protein, 212 aa, Heterodera glycines
KHVSLNIKSPIMSNSGELTFSDKDDVKGKTEDDKSRGTKRKKRKDSPSSSSSTSSSSSSSSSFSSSSESDDTSLSESEGPPAPSKVKKSKLTHVINPRKIFIHEYLMSKLHVSDVKRLPAEISQKYQMVQKELIGKFASGDYAKKPISFRIDEITLAGAAAQKAFNHGPTVAEYFLKKNGITLKHPQLPCLVQSGGGKHKSFYPMELLFFAQ

SEQ ID NO: 163127 - protein, 210 aa, Heterodera glycines
AFFHAEVEKRRQCVRERPTPRKTASSWVQTQSLLKRSLIDNWRNPGLTRAKLFQKLIMGVFIGLLYMNTQLNGVGVGNLNGAMFYIIAELTYSTLFGVLTFFPADFPLLAREYHDGLYCSGAYFVARSASYLPLFTIDGILMVTIAYWLIGLVPTVGRFLITLGISFLVEQSAVAFGVMLSAVCPSYPVAVSVAGPILTILSLTGGLYAN

SEQ ID NO: 163128 - protein, 283 aa, Heterodera glycines
EFHVHSLLNRILKNRLKTVQDGEGLDWSTAEALAFGSLLTERHHVRLSGQDVERGTFSQRHAVLHDQKNETTYTALNNLSPDQAAFTVTNSHLSEYGVLGFELGYSLVNPNSLVIWEAQFGDFANTAEVIIDQFIASGEKKWLQRTGLVLNLPHGYDGQGPEHSSSRIERFLQLSDEDPYRMPTADELARQHQDCNLQLVYPSTPANYFHVLRRQIHRDFRKPLFLPFSEALLRHPLARSSLADMAPGTRFQRFLPEATPDALVAPDQITRVIFGFCPVYYSL

SEQ ID NO: 163129 - protein, 121 aa, Heterodera glycines
MGGNSSVPESMAKKVDENQIRKEISECPVVVYTKSGCGYCKLAKELLEQERIRFCEHDLETKEQQEPDKAQSYVNGLVYVSRHRLVPQVFICGKFIGGYTELTMLKESNLLREEISRCSDE

SEQ ID NO: 163130 - protein, 276 aa, Heterodera glycines
DKLLVCYLEDVKNALYVHSLDDGRELYKLPLPIGSVGGVFAEKSKSKIFVGFESFLVPFILFHGDFSKCPSRESPLQLTETRRVNVPGLDCDAFDSKQVFYPRDDGTKIPMFIVHRKGVKLDGSNPAILNGYGGFNIAQTPYFSVTRLMLAKHFGIVSVIANIRGGSEYGEKWHEAGMLGRKQNVFDDFIAAAEFLISEKYTNNKKLAIHGGSNGGLLNAGCSQQRPDLFGAVVTRVGVLDMFRFNKFTVGAAWTTEYGDPDKPDDFSFIRMYSPL

SEQ ID NO: 163131 - protein, 245 aa, Heterodera glycines
MLLLGEQFPDFGADTSHGKIDSFYEWMGEESWAILFSHPADFTPVCTTELARAAQLTAEFARRHVKVIALSCDSSESHRNWTEDIAAYGNSKGNGSEKISSAADFPFPIIADQQRLLAIKFGMIDPLNSDLSGVPLTVRAVFIVDTKKRLRLSLLYPASTGRNFDEILRVLDSLQLSDKFMVATPEGWKPGSACMVEPRVTDAKAKEMFAGVGGGVRPVELPSGKRYLREVNDPSAGQSEVPRSD

SEQ ID NO: 163132 - protein, 105 aa, Heterodera glycines
FGVPFAFDEASTVIFRLLSRSDSSLIKSWLWNLDETDPLPLEEPTLFDGETVRFWTPFPAEHFRSLTSRSLSAKVACCCLPANKFLKSGGGGGGGGALLSGIFCC

SEQ ID NO: 163133 - protein, 208 aa, Heterodera glycines
MFYRRIFALFLCIFVILFTLQFLPVIDGMQFDVVQCGHSKRCEFGGCAPGKAQNAASCAYLFSMEPEGPDSVRMEMYTRRNVPDVKYVAVAFSDDTQMGDDAVTYCVLTGNGRVEARLSVNPANTKNNVPAPAGAENGFLELLEGKADDNGIYCKFRQHSNNGPGKDLARPNLHKAYYLFLAKGPAEEPHTIGIHSLDSDDHAVFPHI

SEQ ID NO: 163134 - protein, 490 aa, Heterodera glycines
  unsure (1)..(490): unsure at all Xaa locations
MDGAESVILQCATEKGNGVGPSVAADCEANKLAEVTEGLARITATAEGGETFYNRVQEFNRDLTSLXVVVLRAFAAEIPNEKEPKTEEEGPKAKQRKMDEGKAPEANAAQSQPRAFSVLDALSASGLRAIRFALEVPNVTRVVANDFSEKAFEAIRRNVQLNGVQHKVEAVFSDAIDLMMAHRKFGKRFHAVDLDPYGSASAFLDAAVQAVMDGGLLMVTCTDTAILCGNTPEACFNKYGSVPLRHKSCHELALRILLRAIDAHANRHKRYIVPLLSVSVDFYVRCFVRIRSGAAMAKDSVTKLANVNCCATCQSLDFQPLLKKSVSGPSVRFSTAHFQSELVRLFLGQSDASMDGRMVAKCAHCGGTAIHTGGPIWVAPTWDTEFVGKLLAILKGPNAGQLRLGTRERLEGLLTVLSEELPDVPLFYEHDQLMVVMKCPSPKMNVFRSALLNAGFRCSISHCNPRAVKTDAPTSFLWDVCREWAKRNGI

SEQ ID NO: 163135 - protein, 303 aa, Heterodera glycines
FSVNVSNKELAGLKDRLTKCRIGHEQLEDVHDFEYGFPIGELMEWRDRWLNEYDWREAEKKLNAMGDHFRAQIEGLQIHFIRSRPADPSVYKRRVPILLCHGWPGNVFEFHKLVPLLTNPRSNYIRNISSSEIAFEVIVPSIPGYGWSEQPHKGGFNQMATARIFHKLMVERLGFRRYIAQGGDWGSVVTSNMARMFPESVAGLHLNVVFPDFKSPSQLLISLFGSLVPRWIFSGPEGPTFSLAGIFSFIFRESGYMHIQATKPDTVGVALNDSPLGLLAYILEKFVCWTNPSFLKLADGGLE

SEQ ID NO: 163136 - protein, 315 aa, Heterodera glycines
HSIQTLSAWLLHHAKKHADCILDCWLKEVRNNSENERLISLINLANDVIQNSRKKVPSFMAAFFEVLQPAFVHASECLDESHRKMVARIVAVWRERQIYSAKNLDDLSKCLTADEPSTFSVSPNLNSETESPSKSSPVDGGQSPVASEEDTKKIKEEFHAFSTLSSNMIALLRKLEDPASTDVKIRQLIAAYPESIANPTLLKQFKSADEFGELSKKIAEAMPVVDVYCGRLREELKDRQNFQFLLEDYIKALNEANERNKQLVVSVKRRIGRLDEEKQELARHIESLPDLTEMFGSEPATTNLPSLGELFTPTS

SEQ ID NO: 163137 - protein, 220 aa, Heterodera glycines
  unsure (1)..(220): unsure at all Xaa locations
RRLPLVPRIAPFSPIQRFEKQFPKIYYAPEWRLDESGKRMTRGVEEKYSPMNNYGVTPDKWEYMNKVVWPPNYVVPETGKPKPREVFHCIENIHTAPKKMHTVHQFALNMVVDEAIQQLRNHQKKPTFLLADLIEEAKERARKEFFIENPGKMFVAETFHIQSKIVKGARRHAHEKWHPMRYRYINLFVRLQEGXPPKSKKREPDAHGWDKMENYYAFLQ

SEQ ID NO: 163138 - protein, 103 aa, Heterodera glycines
VFLILIVTCSEATILLAYFHLCAEDYHWWFRSFMTSGFTAVYLFIYCIHYFNSKLTITGVVSTILYFSYTSIFVFLFFLMTGTMGFFATYWFIYKIYSSVKVD

SEQ ID NO: 163139 - protein, 150 aa, Heterodera glycines
MLIKLVKATVGVPSPVALRAVSARGVGSGTHWIGNDFEDFDKHYKTGLRDAVPIAAFWKKFSAFVMMPLLVFAGYCGWKDHQNVHHSPRPEYVAYEYLATRRKPFPWGDGNHSLLHNPATNWVPGVGYEAPWPGDAHKKEGDSGGEGKKH

SEQ ID NO: 163140 - protein, 277 aa, Heterodera glycines
SSGQPGGGGPVVVHGGNAVNFAAAAAHQQQQQQAAGDPSQHVAAVHHHHQQQQQLPPQQNKTLFTPAANPAMVSATPAMQQHLQQQAQTIFHQTSATAVPQFPSYNMPYMYSPVATAQTLQGPNAEIDRFLIQQYGTPYSQLDLQMGAMSIGPPTSLAPNHHRATLESYMENKFGQQQQNVNQAANNGHYQQTQQSQQQQRGLAQSEQATLLGGPPSHVGPPPGFGMPTAPTQPSYVQPANIHSLFQMPTYPHPYQHPQYMMSNANRFQAAQRPAQT

SEQ ID NO: 163141 - protein, 201 aa, Heterodera glycines
MFRFLFASGQIRASARSVASYDRMGQNNFAAHISKPFSVWAARENADNLGVVDAGKTLQVTLSTDLNTAEPGKSVRFRLSAVPDSFVGLLAVDQMPLSVGMARENADNPGVVDAGKTLFSTAEPGESVRFRLSAAPNSFVGLLAGDHGMRRGMIGGGRESFVPPRVMQSRAVSTEARDQIRAEVCEKYSEMLEKFMSKDTA

SEQ ID NO: 163142 - protein, 261 aa, Heterodera glycines
VVFLKLSPPLPSDSRRFLHLMDVFNRLLPRPGNGNVQFKKLRHTSNSASIFASDEATGDKQHNDETTNNGMMPATNSPRVELGLMLSNISAEMRHGQNSATEGNGKANGTGKQNKSFVEEKANGNGPSSEVTALSKGKSNGTAKGGGKRFLSALLPGKRKGRLGLSVSEPRLNFDIEPSKNDFEPTEIEGGENAKGGQIADHQQNFGERNRLCDGISDGSRKSRPNFAGALQKVREKLNVRPSSNSHRSSAFSPPMNRSNT

SEQ ID NO: 163143 - protein, 191 aa, Heterodera glycines
MSRVGLFGQISEINDHLFLSGAGVLRPEKLKQKGITCVVNATVEEPTANLPGIDSVRIRIEDSPFARLDHYFDQTADKIKSVKERGGNTLVHCVAGVSRSATLCIAYLMKHERMSLRQAYHYVKSARPIIRPNLGFWQQLVEYERKLRGHNTVTMVPAEGSALPFPDVYSSDLRGHILSNPGPPQHDPQIV

SEQ ID NO: 163144 - protein, 165 aa, Heterodera glycines; identical to SEQ ID NO: 128277

SEQ ID NO: 163145 - protein, 115 aa, Heterodera glycines
MNSSMTVSLLLMLIIGTALLALTNAMPNADASLTREKRGSYGSGSYGGSSYGGGPSGGGDAFGSGGAAGFGSGIGNGFGSGGGSGFGSGGGNGFGTGGGSYGGGSYGGGSYGKRR

SEQ ID NO: 163146 - protein, 139 aa, Heterodera glycines
MTHRQQNEGGGGAVTPNATTTGHLQEQMANAMERVGEAAHNVGQRVTDFFQGDPFGTLIGRKIELATDATKMATENWGLNMEICDFINGTNDGPRDAVRAIKKRLQTQMGKNNAIVMYTLTVLETCVKNCDHRFAVLVT

SEQ ID NO: 163147 - protein, 208 aa, Heterodera glycines
GKESCQMTMSNHNRMMNFNNVNIRKYDNKNERNGAGFGANSDTAAFESWACESFNLFEFLGEDTSPLDEVVPEKMDEDEIEKQKEDAMYSQFQYSDMLIGGQHPTNSHHDFGVNDFANVPSDGRSDFDVPTAFHEGVPFPMPPATHQIYSQNLDAIPHVPSTSKSSMPLMKQEPISEQEQINLQLGLDAPKSSRESSVASGSIHFKYH

SEQ ID NO: 163148 - protein, 319 aa, Heterodera glycines
MFLLPGKCRKNWRWNCSKTAIFKDFPKGCEFGMDYRSWIVGPNFLGMKMIPPGIHFIYFSVPGAPRIAFFHNFRQKEVILRRWDTKKEDLVTDEKSDEVELDRLRENLRNIDRFLGVYPFADYRNWLSLSSYITPNSVRRLSPSNSLGRISSQNEMVTQEAKLEKKLGDPFGLSIVDREHRGRIRFTDESGLPLMSEREEAKLNFTRISQITLADTNLRRAGIDSSDRLFQCFEAMGGDYREVLAEFQFAFVVFLVGQVYEGFDQWKRLVHLFCSCTSALQSHPQFFNELFAVFHFQMKMVPDDFFEDVLASSNFLAST

SEQ ID NO: 163149 - protein, 120 aa, Heterodera glycines
FLTLSAIFLKNPDNNKKINYHIQQKLLVINQFVCSVVVAPHLSVKKFSGMTGREAESGSAKMSGIFLNNEVPFPVNIRLLMTLFILISVQREFCHVTFSYAKFSNSVDKDGNKRKCGIMP

SEQ ID NO: 163150 - protein, 46 aa, Heterodera glycines
AKHILLPFKRNYHCNHMIYFHSLCATLSYKSRGQFLLKLFAMKLAI

SEQ ID NO: 163151 - protein, 153 aa, Heterodera glycines
MAADGKKIEDSERPFVVWQRLDPSDKLGAPKPAPVPSKVKPSSGQSPSPSGIERRVWRGVAPPIPDDILALADSSFEDITPAQMAVRRMAHSPIAPIGMVATVSALVMMIVSMRRRDSLAFQRYARYRIAAQGLTICSLVGGAWYYLKKDGFM

SEQ ID NO: 163152 - protein, 196 aa, Heterodera glycines
MNAHFNGAFGFNFGFMHGALSCARTISACLGSHVHLILPPILSVLDDRKTEEKVRTSALDTLLELARRHSIEDYALPVMQTWLRCIGIKSQQPRLMELLGIIVRKWTQFSVYKENVNAALVRCRVEPMLCHEYQEQLALLQAPSYARQQQQQQQNAVGSGGGVYQQQQGTFSASTSSPLFARQVSFLPPTQNGGAT

SEQ ID NO: 163153 - protein, 78 aa, Heterodera glycines
AIKNFFTKINLKNIKFASFISCAIRINCVRSLTFLVFVTFARARLSVFARFSRRSGGAGRSNAMAHNLAFHFGPLLCR

SEQ ID NO: 163154 - protein, 197 aa, Heterodera glycines
AQAQAQAQAPQPTMSSTLPTSSSTGTTTSAAPLPAALLADLTSAIPHSPPPPVTPATLLATRISQPFYASVSTTRRSGTTAAHALALSHVSETAQFVVGYTSRNAPILNDLKGSNAAEVLLSSPPPGTSLARGQVPKVIRIEAKCYLACSPQLLMRFPPPRVAGDEEPRLTWERARLSVFARLTPAQRATLLIGEPN

SEQ ID NO: 163155 - protein, 214 aa, Heterodera glycines
CIYFSLFPFHVNFLMGNQQSQHNNSGHAHHGKKQLDPRIVSAFNSLSNGKDTIGLEQIKPSIGAKLALSIWPSLQDTQQRITLEQFVERAETILNFTPDIAVRMLMPAQKLVTACLEADGIEVQTEEEKAFLNSLVEHMESNAKTADALVDWKNTNCARMCHPLVERVQSLLTAIPFKQGPKIHSAILNDVQMFILRHALPTTVFFPDPSRHLS

SEQ ID NO: 163156 - protein, 213 aa, Heterodera glycines
MFPAKYKAFRLENKVAVITAATNGIGLAIAERLGHEGARLVVSSRDEDNVKRAIDRLVSSGLKRSDLAGCTCHVSNSEDRSRLLKLTIQRFGSVHILVNNAGINPIFGDLLDVDESAWDKLFDVNVKAGFMMAKLFAPEIEQSGGGSIVFNSSIGAYRSPQGIAAYGITKTALLGLTRALAESLAPKGIRVNAIAPGIIKTKMSKALWEGIDE

SEQ ID NO: 163157 - protein, 141 aa, Heterodera glycines
GAFAKMVKIMKPGRVVIVLSGRYAGRKAVVVKSYDEGSSERPYGHALIAGIDKYPLKVTKKMGKKQVEKRIRIKPFLKVTSLQHLLPTRCIFEADLDKSLVNKEWIKEPRKKKNAIISVKKEFETSYKAGKSKWLFTKLRF

SEQ ID NO: 163158 - protein, 167 aa, Heterodera glycines
MYKCRLVSSPAVPRCNHRMALSAQIRRIEEKTKGRTLAQNAIRRRLQHPRLHRTPPPPPPPPVAVPTARPAPSPVRKATEGRRKVERHKLVGCYGMKTSEKQPNRRRKSEDWTKEKGEGRDTAEEKGKNGEEKANGRGKHPSDGEKAAYQRELLRERNRGNEKLGNC

SEQ ID NO: 163159 - protein, 118 aa, Heterodera glycines
LIRMSTIPMPPPPTQDEKDQQKKSQWKPLEIGNRMRTTSEDSAESFDAYGPDSPNMTSSGRRMSITERLFGRPVPQERRNSLGEEQMGQEKPKSIAENKDFKELMKRQRKILGDDEWQ

SEQ ID NO: 163160 - protein, 192 aa, Heterodera glycines
VGAIAATSIGEPSTQMTLKTFHFAGVASMNITQGVPRIKEIINAVRSISTPIITVALADERDEKLARRVKARTEKTTLGDIIDYVEQVFLPDGLYVLVKLNTRRIREMELEVTMDTIIDSICASKLPVSRILCDQIRSVGKSMLLVRPVESSKSRTKFNNSLVIAEVLGIEAARGSIISEILAIMGKHGIEL

SEQ ID NO: 163161 - protein, 285 aa, Heterodera glycines
MGEFFFNLDHGYLEALIRGFKSGLLTSTDYSNLVQCETLEDLKLHIQSTDYGNFLANEPGNITVQVIDERLKEKLVTEFTHLRNNSLEPLATFLDYITYSYMIDNIILLITGTLHQRPINELISKCHPLGSFEQMEAIHIASNPAELYNAVLVDTPLAPYFVDCISEQDLDELNVEIIRNTLYKAYIEDFYNLCKKMGGKTAEVMCEILAFEADRRAFIITINSFDTELNKEDRANLYPRCGKLFPEGLAGLAKADDYEQVKQVCEYYSDYKQLFENSGLNPGEK

SEQ ID NO: 163162 - protein, 94 aa, Heterodera glycines
MTQQQGATDTDLRTFRDFLFQYNAVTEQCFDACIRDFTSRDISEKEERCSKNCMDKFLKAGQRLSMRFQEHQLLNMEAQGAPVMATNTKVQIGK

SEQ ID NO: 163163 - protein, 343 aa, Heterodera glycines
LFTKIEPAKVAEWKELFGSGKQQQNQPKNNGPTAMSSSSSKKAPNSTEKQQQKQKKKKENMAEERGEVGQIYAEVMAKFEKAKALFVTNESEKLDTEIAALKEQITEQKARLGFTGALFSPPMPKATPAIVVPPAVSSPQTPPKLTAASNASKEQTQQKQQPKQKKPQQQQATAPADDTVDVGCLDLRVGRIIEAQKHPDADALYVEQIDLGEEKPRTVVSGLVRFVPLEQLKNRLVVCLCNLKPAKMRGVESQAMVMCASTPEKVEVLEVSPESVPGDLVVCEPFVRRPPQQLNPKKKIWETVAPDLSVSETGECIYKGQILRVERLNSSLSASTLRNVPVK

SEQ ID NO: 163164 - protein, 380 aa, Heterodera glycines
MVDAHFAGCAHIKSEYVVLRSETQQQEGGNKPPNESNPLEGNSHEGILPRNVRARGMDRQREQKMAKARAENRQKIVRICPSVLFESEGRKCKYGEKCDAEHSLTKYWAKKPPDIGPSCFLFDQMGKCSFSLSCCFARAHTNESDLSQKSKAGHSEWQSVLNTHTLPIQQQLRKRTYDFSRSERALHESPSGCMEREAPKWDMRTLRGKKYLAPLTTVGNLPFRRLCVELGAEVTCGEMAIATHLLQGLPSELSLMKRHPSEKIFGVQLAGGYPDSLGKAVQLITDNFNVDFIDLNLGCPLDSVNEKGAGCSLANKSNKLVSVLQCMQKSATGVPVSVKMRYGVKEGERTAHYTMGTIAERSPPQLLTLHPRSRGQRYTR

SEQ ID NO: 163165 - protein, 107 aa, Heterodera glycines
MAEEYFLIAAAAFGAGIYCWKTYLGPLLEQPKSDDEEKPKPEGGEEATTAGDKEEKKAGSKGDKHKKSGSKGDKHKKDKKSGSKSDKDNGPADENKQPQTSAYATPT

SEQ ID NO: 163166 - protein, 196 aa, Heterodera glycines
MRVVPIPANTDNYMYLIIDDDDKYQKGHRPAALVDPVNVEKCFEVVKTEGTLLEAALVTHHHWDHAGGTYQLAIKSRSGFSDLLMKQPLCIISGDAERVERTEKVIADGESVQLGTNLSVTAMYTPCHTSTHVCYYVVDQRTNERAVFTGDTLFIGGCGRFFEGTAEQMHHALNERLAALPDETLVYCGHEYTVAN

SEQ ID NO: 163167 - protein, 237 aa, Heterodera glycines
MSSSAPTQALCIGMTYPGSDSPLPGCEVDAYKMTQLAANMGIPEESISAMSDVAGTEVTKADVLASLREMVDNAKPGDNLMFTWSGHGGQRPSTELGETDGQDELIFASDGPISDNEIYDILRDLPEGCNMNMVFDSCRSGTMVDLDFADLDANIVCVSAALEDQNSLGNSDGGVFTNQLCEVLQENPGIALADAIETVNTLNAANDVPHVAMVTTTTGAEHLLQEPAFGLTDPVEF

SEQ ID NO: 163168 - protein, 99 aa, Heterodera glycines
HLQLGSIEMDCFDNDDAFGELVYEEEEFEQELEDKRKQGQKCTSTQREEEEELRETENEILPELRSERVFINIPAIKFSLVVQLRGFTWSKVKLRPTVT

SEQ ID NO: 163169 - protein, 123 aa, Heterodera glycines
IKPSFPVGHFSAKFPPPRPPRAPPPCEGTPAERPPPNMARRNPLGATPPPAPPPPPQAMPGPSAPPPPPAVAPEAGEYCFARVGCGAPAILRAAAQMRAHSSSTSSSSPGTGGAAPEAAGAGV

SEQ ID NO: 163170 - protein, 84 aa, Heterodera glycines
TSKNEDYDPDIWHSKEQQRQLMHNAKQSRILKELGCPAMGDGCCSNALLEASVKARVRDVARYQLRRALASNLLFKSRGRNDQL

SEQ ID NO: 163171 - protein, 98 aa, Heterodera glycines
SFLKMEFVLIVRLPNDLKYITVRPSSTIAFVRGMTASLMGTATENVRLLLDGMPMHDGRTVEHYGLTSDSRVFAELINKGTDGAGSSAGKTGKPPAGR

SEQ ID NO: 163172 - protein, 298 aa, Heterodera glycines
ENKDGSFLNKRDISDPYCEIQVGSQVFHTRVINNNLNPVFNECFEAVVDQASGQKLRIELFDKDTAGADEELGRLSIPLESVRQAGEMERWHHLEGCKHGELRLKVCWMDLSTESTGVGRDEWEQEWLGADKPMHPALLMVFIDSVANLPYPKSNLEPSPFVEVSLGRITQRTPVKPKTVNPLFQSKFNFFVKQPEGQELKIRAVDEGTKRDIGELSIPLAAVMREPMMEMSQQSFYLTHGVHSSPIVLTARLRFFTPPRKVLEARDLSSTYGNAVHIERGDRTNSSLSEEDGQSNHN

SEQ ID NO: 163173 - protein, 202 aa, Heterodera glycines
MATQSNFGKFQQRSSRQSSRIISQQPTKCFDEAAKRRRIQQQLESLEKDNFQEDPHANITWHKAAPKFDDEMVFGDKEKKRRKRKIASPSKVSGAEQATKKGKKIVAALTKTRFRKTFAQLLEEAQRKREEETQQRRKEASPELLLPTYYEVASSPSKVPSRKFCAVCGLFAGYTCVRCSARFCSIPCKDMHLDTRCLKWTV

SEQ ID NO: 163174 - protein, 93 aa, Heterodera glycines
TLFTVGPLLGSSKWEHAREQPSGLVQIDLGLNICGRSVPGNLVICFAVQRGTVEYFGDQQHKPCKNLKKNKKLLSEKMEAVRPPRRKIQEKIL

SEQ ID NO: 163175 - protein, 194 aa, Heterodera glycines
MSDFFLDNSDMDDNELELKLNNLQMLKNRRANKSLKMPPTDIGTTKLPVNGKGIGYRPLPENAQLKRDIETKMGTTDSEEKEKEPKEENRVPPNENGNGNRPLSDNAKEKNAQLKREIKEILGIIDSEEKETEPKETKFCEMFSWVQLFFGLAFLLLSFAVFCWCASNKTQTSNTPTHSNSSSVPSNVPVPPFL

SEQ ID NO: 163176 - protein, 241 aa, Heterodera glycines
MSRPLPNVTQTANILRSNAPSPHNQQQALYQQQQMLPHQQQQLHPPPRLNSQPPYTIVYQNQQRTPQPTVLVGTANSPLQSQSISSSCASSPQLSMTSSSGGGAGDGGTAAPVASANPHDPKRLLLKCAHFFKSLSRFKPNSSQEQHQQVLQLLREGVTSEMSAEEFSAKLREVTGSQDKGTLLPFLKLSLPLLRVSLRKGEQNELQQMLRLDGAGSASPEETALLSPQQQQLSDNGVDEA

SEQ ID NO: 163177 - protein, 147 aa, Heterodera glycines
  unsure (1)..(147): unsure at all Xaa locations
IMLGLPYDFGIDLWSVAVTLYEVYTXKIMFPGKSNNQMLKFMMDLRGKFPNKVIRKAVFKDQHFDYNCNFLYHETDKVTGKDKVTVLTNIKLLRNLPAELSGDQELDRDGFAKVDHFRSLLEQMTALDPSKRISCSDALKHPFIVEK

SEQ ID NO: 163178 - protein, 79 aa, Heterodera glycines
NDQNKTMLNKEKMAKYNDKQIKIELTVTAQPKPNENRKSSKVEIEKSAFRHFLAELVRLAQESIEIEITLTVPRAVRLL

SEQ ID NO: 163179 - protein, 90 aa, Heterodera glycines
MGTKIKIFNKVIWIPKRIWGESLAFAGILIGLHFVYYSMQNNPNLIPLNDRRELIYVKWIKEKFPSLGWVGIDDSEAMKRRERIMGQKEQ

SEQ ID NO: 163180 - protein, 198 aa, Heterodera glycines
DFGGKSLFKVLADSAFEKPSLVDIFFSSKLFQASLNDACEALIRTQSQQFKLLKKRNFDVIISEQLNFCGAGIGHLLDISVNIVLSSCSLQEHLASLIGLPFPSSFVPSLMDSNWSDKMSLLQRFQNLLHKFAGYNYLSCGIDPLTQIFRKHFGNAFPDLRSIVSKSPLIFVASDEFVDFPRPLFSNVIYIGGLGMEK

SEQ ID NO: 163181 - protein, 161 aa, Heterodera glycines
TSSFCRHLTKVAHRFFSSSVRQTELSLERHEWQTVMCSNGVIACWHPPKQFPFEHSRTFNMEKAMSEKEKFLNRKPDQTLFTTAPDDNALCEIFHTEKQEWRPIYREKRLYNAKVEDQLKPILSNPLETPTAPVITKNVENEAHRIEQGVNEGNNPNILSE

SEQ ID NO: 163182 - protein, 286 aa, Heterodera glycines
  unsure (1)..(286): unsure at all Xaa locations
ECHLFGFAPSISPPIPFXISVLLLLFCLQFFPLNALHHSVFVRRDLSRPAPDDGVASASINTEEDLGGLNTEWLTDDQLSELASAGSNEERMIKMRTFYDNLEGEAKKGATKKIVEECYGWVDEVATEDERNALKQMHHQSHDECKAKVRELMGRLSEERSEQVENRMGFCEHVYYGKMDGEGDGGAGTAGDEHHHHHHHHTKRRAHRQRRDHHHHHHGEHGLEDYFKTHLAWLTDEQKAEISRMKESGKSRQEIKQKVIELYDATTGEAREKATELXEGRVPRAD

SEQ ID NO: 163183 - protein, 222 aa, Heterodera glycines
LRHLFRASLNAYSNGPVIAENIINSLKRNREMGKEQQKQQNKEKKVAAQQQQNTGDEAGTKKQTRLGLDVTKTENYSEWYSQVIVKAELIEYYDVSGCYVIRPWAYSVWEHIQAFFDAEIKKLGVKNCYFPMFVSAAALEREKTHVADFAPEVAWVTKAGNNDLAVPIAIRPTSETVMYPTFAKWCKSHRDLPIKINQWCNVVRWEFKHPTPFLRTREFLWQ

SEQ ID NO: 163184 - protein, 199 aa, Heterodera glycines
MSNSNDSDDLIIYDDNEDIKDVSSDSGDEVAMEEVTNAGTSTAGALSNEEIRDYQVLSQTELVDELNKLSSETSAVLRFNGSICKVLLHHFKWNKVTLIERFFEFPETSNTDSFFRNANLLDPTKHNKIEGKGDYCKNCYHLRQLTGMLCNHLFCRQCWSNYLSCKFLGEGRPYVTCPELRCTIVADDEFVLKNVDNKQ

SEQ ID NO: 163185 - protein, 262 aa, Heterodera glycines
MVTQNDHLMANLSDQLTNLQKELDTLKKDMTANNDAFFNCAMALIIFLMQCGFAFLEAGAVRSKNCTNIIIKNVLDSLLGIIAYAAVGWALAFGSNPLPVLEPYFGFSQFGMVGTTEFSKFFFQFVFCATASTIISGAVAERAEIACFITYSLAITAFVYPVLTHWGWTKQGWMAASGFVVDDAHQITYVDFAGSGMVHVCGGTISLIAAALMGPPIGRFPERTVSVPVGGPRRKQNEPKSVEIKRHSVPLASMWGFILIAG

SEQ ID NO: 163186 - protein, 149 aa, Heterodera glycines
MKFSHVLAKGKVNLNAHTWFRRVWEKGYSGPPLPKIKRTGKPPVPVTNEAVNEVRTALMREWNVMQWLANPYLNAEKEAPYLERFGDINDEWTQRTVEAKHRKMPNKPKIRQIASGEVEKRRANVGNLLHAHRTVEDELKNLERRNRWD

SEQ ID NO: 163187 - protein, 214 aa, Heterodera glycines
RFSSSNVGCFSAVKMTAAAKLSRFFRRLVHVRQMDFEFAAWQMLYLLVNPQKVYRNFMYRKKAKDQWARDDPAFLLLLALSLLGSSVLFALALNLSFSSFCAFFLWVVFIDCIGIGIAIATALWFISNRFLRRTRDCDVVEWAYCFDVHLNAFFPLLILLHVILPLLFYGLVDYQNFLARFFGNSIWCIATIYYNYITFLGYTALPTLENTQFF

SEQ ID NO: 163188 - protein, 150 aa, Heterodera glycines
MFRFSLLLLLVPLVRCVPNPKPLFGIGIGRKQSAGAEGKLTCAGEPLADVKVKLYDDDRGVDTDDLMGETRTDSEGRFRLEEYTNEITTIDPKINIYHDCNDGLKPCQRKISIMIPDKYIASGEHPNTYYDAGTIELEGKFSGETRDCLH

SEQ ID NO: 163189 - protein, 209 aa, Heterodera glycines
IVSLCLLISVKILRLTNLDILFRIRDGLRSGKPFITALFRVDIESQRHGGELVAEVLKAHGVRELFTLCGGHISPILVACEQIGIRVLDTRHEATAVFAADAAARLRQDIGVAAVTAGPGITNTVTALKNAQMAESPVLLLGGASPSLLKGRGALQDIDQQTLVRSLCKFSARVTCVRNIVPTIRNAIATAESGTPGPVFVELPIDVLY

SEQ ID NO: 163190 - protein, 193 aa, Heterodera glycines
MSTSSKLTVINTIATMRQFVRKHRKQNANLCVALVPTMGALHQGHLRLAHQARQWHNDKKEQNGTTDQCASPPLVIVSIFVNPLQFGPNEDFERYPRTLEADLAKLEGVVDCAFVPNAVEMFGEEKQPLNHKDEEDGIGIKSGRIGRILEGVTRPQYHDGMLLHVAKLFNIVQPNLAFFGKKDAQQLFAIHQL

SEQ ID NO: 163191 - protein, 204 aa, Heterodera glycines
MMRPFLGVRRIISVYRTISGLRPFDCVQRTLTVPIEGKAPKRCTAEEAVRDIESDEHIYLHHAMSCPTDLLRAFGKHIEKNDLRGIRASHALTCGEVPWTDEKLHDRVRSTTIFICSNFRKLVNQGKADYLPVFLSQSARLYDEKVLRVDTALLNVSPPDKHGYCSLGVSVDMSSAAARNAKRVIASINKTQPRTFGDAEIHIS

SEQ ID NO: 163192 - protein, 68 aa, Heterodera glycines
LSHNRFTMLIFPHIKFSTLLKRATVNSSYYVSYAAYGASAFLVLVYVTEWKRFARYIPGLRSQIKSDE

SEQ ID NO: 163193 - protein, 81 aa, Heterodera glycines
LNVTMFFLITLLVKRQRMVRIRRLPVVVRPLIDNFVLRKFISFVRCGCCGSCAKIPNTKSDKSSRPKTTIPAPIEHRHNQE

SEQ ID NO: 163194 - protein, 202 aa, Heterodera glycines
MFAGIDGQQNLLLSAQLQRLLCHHGETANAFVFCHQMQPELQKGPTCGFAVLLMALRCSVGDGTLDRLVEMGKHFGITYNGELFSADWMCEFVQKHWPNACELRVAQFPSPNSIVRHLISGKKAHHQCTTTVLVPYDCDKNFEPCNRQGVAAHWAIIIGFVIFDVTAQNGPENHAKVIAFDENDFRCDGFDNEHLLYLIALQ

SEQ ID NO: 163195 - protein, 160 aa, Heterodera glycines
MGNCKPADATESENASSVETVEVEVPPDPLVNPFWKMQKAFEKKLRNLLKREKKLLQLKEERDSDKPITTDQHEALSKLDEVKTLIGFVDEMMKLNQQQFSQYKKAIKNRERQLKMQKARSQIGTPQLSDELKKSTEVQTNGVAEEVQAAVGVVGPSSEV

SEQ ID NO: 163196 - protein, 339 aa, Heterodera glycines
MTTEPNGAVDQQQQLLFASTACACRPNTMEWCKTTSFIAFASQRTICIVSDQLPYHRIIETVERAHGAGEITSLTLLRGGTVGNCKIRSLFCTAASSGELAIWKMFKTPTTTTIADGDRRHVMCIKRLSKKASIELSKMAAYAGDTDDVLLAILQFDHIDVQFLNLDGDDDQIGAAVSSLKFGSAIPSTFELSHICGAVVMAVGLSYGLIDIFVSETNSYSIQKKLSLDLCGSNKSWTRALAFNVSEDGQCHNLSLAAATDGLIKIWQFVGDGDKITVTPLANDDDEDQQLKMNQQTFCIQNGVAHPISVTLESVLHAQTGPIYALAWHPKRLELLSSG

SEQ ID NO: 163197 - protein, 162 aa, Heterodera glycines
RKQRFLFFSRFKMSLFLLRALPLFFLFSLCFAASPFNFRANHSLGAETTQQIVPTVATETTDGPKPTENVPLMLENDNVTEVAKVEGRNANDSEIETREDQAFANITAHSSDNASLTESCGFFCRNVPLFVGFILTLVCVSLLLILSILLYRYFTRRTYADE

SEQ ID NO: 163198 - protein, 198 aa, Heterodera glycines
MASRTFSRFASNFRLFGSVMATNLSGRSHCFVAKKSLSTSPLVYATAAAASQPTTPKATVKGKKGRVVAVIGAVVDVQFDEGLPPILNALEVQNRASRLILEVAQHLGDNVVRTIAMDGTEGLIRGQEVVDTGDPIKIPVGPETLGRIINVIGEPIDERGPIGAKNYAPIHADAPEFVEMNVEQEILVTGIKVVDLLA

SEQ ID NO: 163199 - protein, 201 aa, Heterodera glycines
MSKHQKSAVTPPTTTTTAAESGGERDGRTETTSGQRKRHSANQTDSANGAAGGQGSNNAVVLSSSESAAKEAKVRKMSTTSQNKGHKSNTMAEDSGGGTGTSAASSGNGAEQNDNSRATRRPAELQHLIDYFPDQQSTDGNRMTRSKARAMQDKSSNSASGSSGVQQQGSSGNGSGGNGPGGSSSAKSVGNGVAATPNTHH

SEQ ID NO: 163200 - protein, 207 aa, Heterodera glycines
MRHAAAPIRDYDHLFKLLIIGDSGVGKSSLLLRFSDNTFSTSYITTIGVDFKIRTITVMGKKIKLQIWDTAGQKRFRTITSTYYRGTHGVIVVFDVTSIESFNNVKRWLHEIDTNCENVQKILVGNKVDEPSRRAIPEAEARRFAESMRINYFETSAKENLNVEQMFQCITEIVLESCVDREKNNPRQATDVLKLRQRPEKKRKCCG

SEQ ID NO: 163201 - protein, 111 aa, Heterodera glycines; identical to SEQ ID NO: 138785

SEQ ID NO: 163202 - protein, 132 aa, Heterodera glycines
  unsure (1)..(132): unsure at all Xaa locations
LHHQIFPTCLASATPLAPPTTPTSLSLKATLGPASTLPGRSCATTAAATTRPPHPRQPANPASPRRTTAMSTRXLSMCATPTRTLPRNCTSSEPSCVNTTPTTWTRTRSKSTCCATTWTAWPLFPCTTRLAT

SEQ ID NO: 163203 - protein, 118 aa, Heterodera glycines
MDWGSDLEVDTEIPSLESLVSWEILKHLKPKEKKRQEVVNELYQTERTHVLRLKVLYKVFYRPMVLQRVASPHLVKLLFGNLDELLKVHAEMCQKMKRLRLQNGLYGELGSVMEELFC

SEQ ID NO: 163204 - protein, 329 aa, Heterodera glycines
  unsure (1)..(329): unsure at all Xaa locations
MPLFLGIDLGTTSVKIALIDGDKKTFLEWDRKHNALIEREEKDKHEQSPKKILDTVQKLMGEMETDKLAQVKGIGISGQMHGVMLWEADSIGLGVDRCHCSPLITWMDSRCDEQFLRKLPNIPLDSVQKCVYFLTKCRVVGFRLRLHLDRPTDKLIDALPLXPFHFAFPHAHFPTHLLPSIVSPGTFIGRTSLPFAHLPKGVPVTVPLGDLQASLLPFLSAGVAALHIGTASQIAFVSQRLAEEMSPKVVLPNSIRRDPFFDDDFLLVAPSLNGGNVFTGLFQQIASWSADLFGFPSDFSPLSFSAAFSLLDRIFNSPNSQPNDGEVPP

SEQ ID NO: 163205 - protein, 206 aa, Heterodera glycines
MTSNSTDGWGCNNSGWGQSQAKMTSNSAADGWGCNNSALRPNQAKMTSNSAADGWGCNNSALRPNQAKMTSNSAADGWGCNNSALRPNQAKMTSNSTDGWGCNNNGWAPSQAKMTNSTDGSGCNNSVRGPREFSRSFSGRPGFNRQPVPLMNKLPPIPPSTILFVDGIENKNKKLPLLSVEEITKIFWDIANISVLDVTRPKQHMR

SEQ ID NO: 163206 - protein, 145 aa, Heterodera glycines
KKTTSKTKPKVTIPSTLSSPSPYAKKIKKLPKQNKNTIDARGLYHTGKHNKKPSRAILELPGWQWDRVPIPKDPTEECGKIVFEIKVDANGEVVAVRTIEKTITPLVEKIYADELRSLTFSKTNHNNASYRNLSTGKVIFILVAK

SEQ ID NO: 163207 - protein, 297 aa, Heterodera glycines
KFENLMPTAGEIVHEERQQEKMKKTNFEEAKEEKGRKGTIKGGGRRSKRKRCQRNRTASCSSEKEKQTQQFDGIGGATPPRQKRHFPQAAVVDNGARRVTKVWHDEKQRVKMARVETAVEGGGGDSDGTMAGGRTLSSSSVISARHHQTQSRNALKPRAPNNTTSFLMSDLEKRQQHEEDDPQQHTDALGQVAGTQRGQKVLGSKEVGGATNGGHQLTTPMMAGESALLAEGGDGTDIEEQRDADFEECLFSTSIERIERLSREEVNRELLLADRDNRMLKQRVTLLRDSYQQVQEE

SEQ ID NO: 163208 - protein, 143 aa, Heterodera glycines
MGRPFLEHMGGRKYYSCRRCKTYLTNRRELISHTFRGATGQAYLFRNVVNIVMAKVESRFMITGQHMVRDVFCKICNGKLGWMYEFAHEPQQQYKEGRVILERELLTEHEETDPGLAERNRPLTRTSSSSSVSSSGISSVTIT

SEQ ID NO: 163209 - protein, 167 aa, Heterodera glycines
MRLEKCWFCSSTIYPGHGIQFVRNDATVFKFCRSKCNKLFKKKKNPRKLKWTKASRRIRGKELVNDVTQAMEIRRNEPTKYDRNLWETAVEAVKEIHSIRHRRYGEHIKSTLKPGKQAVKRAMVEKARKKVHLIRAPVAMGEDDEKLEVVEDGEQKTEEGELQMEVN

SEQ ID NO: 163210 - protein, 146 aa, Heterodera glycines
NDRRVHLYDLPANGGAFVEKKVLQHAGAITSVNFSPNGKYLVATDIARKVVPYRVDDGFKVASEKEWSFHTARINCCAWSSNSRYIATSSLDTNVMVWDLQQSGEHPLVIRGAHSMSAINGVAWLSDNRLLTVGQDSNVKQWTLKL

SEQ ID NO: 163211 - protein, 230 aa, Heterodera glycines
FWQTMLTLLLAICLSLGPILAYLSIALFSHRFLIVDRSRNRPICTSPGCVRCNRNANELASAMDRFQKARFAARAQFARVRSALERARCASVDDAHELFFRMKFEGVQRPVWTRSQLPPAFVAKMELFERQHAAIAKECERALDQCPYLWARNEERAPALHTDNGAAFSAWFVFPLINQGDWQEKQCRECPRITALLHQLATDDGVVGTTDGVSAVSDCSSASLLTDCLF

SEQ ID NO: 163212 - protein, 195 aa, Heterodera glycines
MFELADQSDGTSGIKQLWALIDPIWKFDRAELVDCMAKRVIYETDDLIALDKPFQMAFSSGPDDQPQLDRILQDLKKHIAPKIDRLFLVRSLDKNCSGVIVFAKSHVKQLEMKAQLQNDALLFRYRAICKGVPKMAKARISIPLIKVLRGSNLKFCPLVGEADERQQLYHLNTDVRMVNGNPKVQCALLDAFERR

SEQ ID NO: 163213 - protein, 208 aa, Heterodera glycines
MVNGGSGKLHQIVVESEPKKASVVVDHSPQKEPEKKPDAPSDAAPTVVDSLPSPTSTPNKKDEVMAISAVAPPSSIVDVPKTDDTAPPPSLSQPVAATAAAAPPPTSEQQPNPAVVTTAAANNTNNSLAQRPKSVVAGSYAAIAAAARGNGPNNVDNIVTVHVPAATNGPTAPTPSKEIPQHNNNIAKHNPEHQIAVKQQQQTPPSLP

SEQ ID NO: 163214 - protein, 185 aa, Heterodera glycines
MDPSAVSSSSSTDQQQNAEEAQKGDLTLAQQIAEDKQKMFERSQQYQQEIEDEIRKTQPLVSSKQNIVHLVGEFDEKTSSQYFKKATELAGVYSDIRRIRGDGNCFYRAVLTAQLERCFEDAEELKRFNELVKGWRARLMAVGCFPELTTGDYCDSMEQLMTSLLNGTMLPQILLDDLNQDGIAN

SEQ ID NO: 163215 - protein, 274 aa, Heterodera glycines
MSSKRVRFTEERNATERVKRSRTEAAEEEKRERLDDEEDGGPAETAEGMKTKRTKKHTLDSDEEDETEGYQRLDMDKVEGQEESTLEYEGHVKIMPFNMKDDLEEGHFDANGTFIFDKKQSVIKDAWLDNIEWDNVKNAAGKHWGKLDDEDDKKADDEKEVEPKEVYRRLVELLNEKETIGAALKRLNNEKKSNAAEERKRRWAAKKAGANVQEDEKTKQIAELTSLADSLISLGNMEAYQLDQTSINALLDDLQAKNKIPGAKEATLDMFSEG

SEQ ID NO: 163216 - protein, 321 aa, Heterodera glycines
AMAENQLSKSAKDLPVIIARPSIIGAIWQEPLPGWIDNLNGATGIFASVGKGLLTDMCGDVKSVADIIPVDIVANMLIVAAACRSQMGQCKEIPVFHCTSGQLNPLTWERIVVYCEQFFIAFPFDECYRIPSTQFHANHNLFLANFYAKHLSVAYALDGAYRLLGKKAKFVRIYSKIWRIMEVLHYFTSRGWVFESQNALKMWERLSEEDKKLYCFDVRKVDWDKYLFDYLMGIKIYLLRESLDDVPRAQANLLWQKQLNLYSNGLFFALLVRLFAWRRSKRQRWAFWLSGFLLSFAYQNANHWLRPAVRLRNLEEYKRTA

SEQ ID NO: 163217 - protein, 172 aa, Heterodera glycines
MNCSSAAMLMLLMTIFTVLSNVNEVAAEEHELVSRIKRNGYGYSSGYGGGCSACQSSCTTCGYTSYHTVPAAPAPPPPPPPPPPPAPVYSQSSYSCSTWGGSSYSSYPSSYSSYPAFFLFLLLLPRFFLLLLVLVLLLLFLLLHVQLERVQEQLELRWAAPPNTWNSRRARP

SEQ ID NO: 163218 - protein, 131 aa, Heterodera glycines
RPPTNSSPPPTNSSPPPTNSSRQQTNNSRTQSTTSSKTSNNSKTYWPVSNRLFQRLPPGFLVNNSSIIMRQRTFSATSMRSAARIHTRHLLAPTFSVVSPKILVFSSSTCRSSRVPLLRRHRSKTLQVEVE

SEQ ID NO: 163219 - protein, 186 aa, Heterodera glycines
VFSTDNLRSARLAEVRQHFKQNSRIFFAKNNLMAVALGKSAQDEQANELHKVSALLRGQSGLMFTNAKANEVQRFFAEHTEAEFAQAGAVASADISLPAGPMPAELHLHGAMEPQLRKLGMPTRLENGAIELLEEFTVCKTGDQLSADQARILKQFGHRLAKFRVRLLARWSKKKGFEQIDGGAEE

SEQ ID NO: 163220 - protein, 145 aa, Heterodera glycines
IRRYSMCHRSQAATDYGISSCCCSYCSTCNCCSITAVPLPTTAQPVVAAVTVTVSSHHRVLPYHRPSMIRMLLLALLMVYCCYCHTVQCSPSTVWNTVSGAEDNIDTVVAAANNGGGATFLVPQQQLLVPLVRQEVRTMPEVAAS

SEQ ID NO: 163221 - protein, 247 aa, Heterodera glycines
LTPVGPSVAPLAFSSSSTDASAVELPYAVPNFGTPTEKLLLGGELIAVPSALLADEKIFRSVLCPKSFWSLSQASRDHLEHFLPLPSISSAIKSSSVSVARRNCGAPLDELLSCAFTSDPNFCFGNPLAKFFARIRNGYFSSPEQVQLRDHRRVLYDHYIRHYQMNLLKTLLINSHVLLEQSTMLNSFDEHVRLNPRTFCSLRKLAKHKEVRARAQLRILTHDKRLSCPRGTGRSGRLFIGRLSPGG

SEQ ID NO: 163222 - protein, 212 aa, Heterodera glycines
MFWSSNFALLSRRLANPSCSNFSTNLRFFNVGASLFGRKRADAIEESEKSVDFGRLDVRVGRVVAVRKHPNANSLYVAHVELGELQPRTVIAGLVKFVGLEELQNRLVVCLCNLRPSKKRGIDSHAMILCASTEQKVEPLELSDQSSPPGSLIICPNFARQPDKVLKKSVWEEIALDMLVSGTGECVFKGTPLRVDAEDGASSLVTAPTLRN

SEQ ID NO: 163223 - protein, 153 aa, Heterodera glycines
PIKPFNSKMGTNYSTSNSAPFDYGMTSRKKGKNRTYESNHFDKNYLIEGTEFWAENEYRKDSYLFERRKGSDRANFAEIYVKTPAEYGSPRVSCWAFSCSPCASSKESAVAIPSHSLPPSSAPWSSPIQPNGAKSAHGSRPVGVRSKYLPTFG

SEQ ID NO: 163224 - protein, 290 aa, Heterodera glycines
MLNTGKFLGKTFVITGASRGIGKEIALKLAKDGANIVICAKTTQDNPKLPGTIYSAAEEIEKLGGKALPLQVDVRDEQQVEEAVEKAVKKFGAIDSLVNNASAISLTNTLDTPMKRYDLMHSVNVRGTFLMSQKCVPYLRQTSNPHILNLSPPLLMDKQWFAPHVAYTMSKYGMSMCVLGMHEEFRKDGIAVNALWPRTTIWTAATQMLTSGRGQRNSRKPEIIADAAYVILSKNSRDYTGNFAIDEEVLKEVGVKDFSQYANDPTAELFPDFFVPGVNYEKAIEAAFAA

SEQ ID NO: 163225 - protein, 180 aa, Heterodera glycines
KAITAGLKALKLLGVEGIELPIFWGVVEKEAAGKYEWSGYLAVAEIVKKVGLKLHASLSFHGSKQTEIGLPDWVAKIGDAEPGIYFTDRYGQQYKDCLSFAVDDVPVLDGKTPMEVYRGFCESFKSAFADYMGNTITGITLGLGPDGELKYPSHQHNAKLSGAGEFQCYDKHMLSALKGY

SEQ ID NO: 163226 - protein, 200 aa, Heterodera glycines
MQAVTRPPIVLERGVSGRVKWFDFSKGYGFITRDDGGQDVFLHASSIVRKVNMYFVLIEGQRVEFDVIDGEKGREAAAVSGPGGIRVGTAIQYNNTARSQPLPVNANNSAGRMFIAGRFRRPVGKPNNKAKSAVASVPAVVNGGDDSAKCPPLSLSGVTRKGRRMFKANDGEKGKNSDKKESASDGVGKEKDNGGREGEN

SEQ ID NO: 163227 - protein, 166 aa, Heterodera glycines
GIHPFCNIGVLRKTDDKSLMNGQLALKGCEIMALYFGAHMSQRCREFIPVLKQFYDQLKKSPETMPFEIVFVPFDRSEDEFRNSLRDLHDDWLYIPYGSVHINSLAARFNIINWGVIPTLVVLKEDGTLITMAGQANVQHLSASEAMVRWRSIPNPESGFKDFSKF

SEQ ID NO: 163228 - protein, 107 aa, Heterodera glycines
  unsure (1)..(107): unsure at all Xaa locations
GEGDRLAVQHRQEKEFERTIRTYKSPYISFTYFHSQTLAEEAKRNAHTLVLHFVFAFFILFXLSRRCTTCPICRAHNCYIDWTLSKPFLAILGVVNAGMGIVTAIGY

SEQ ID NO: 163229 - protein, 211 aa, Heterodera glycines
MCPSKTQHLEQFHSLNIPMIFILSALFSLSATFAQFVPAKNRCYSCASDNMKENFLTRSRGPPGRVREPRLFDSMCDSDTWVIREKSAIECQGACFKWQQTLNNSGVLSYATIRGCYEWMFDSSVGGPTPSSDSSSSVAFNTECKHTQRALVCLDEFSSVEESTCWCFGDFCNAATAKGDGIRNAIRATASALFASSLFMSFWKLQQINCK

SEQ ID NO: 163230 - protein, 116 aa, Heterodera glycines
HSLASITSTPTQSTSQNGLPFLLLPDLPPIPRDSPSRRCRLRCHLIRDLLIHGQDLGRSRLAHPSKPRPHHLRRAPQAVGGGQEALSCSAVSSSRPQPDPLHTKSTHHPTFFRLPT

SEQ ID NO: 163231 - protein, 274 aa, Heterodera glycines
MATTDGMVEDGKVGNDLQSAKFTKDKEVVDIVQPTAKLIGLTKEQLEQYRNDPFWKAIRYSLFVAFWLIWLAMFVGAVLIVVLSPKCQQVNWTEKMVAYKIFTLAYKDSESKNGFGDFEVIEKKLDQMKGIGVNAIWPTPVLKYYKNALGPEAIEKLEVSDQLGGAEGFKKLIKRAHDNQIKVIVDLPLTVNAKGNWANKTSDTKNGIALIDLDNAANREGLKEAAVRFLDFGVDGLAITDYGLFANSVHLGSLVDLIRTIPKAEKIPIYARGS

SEQ ID NO: 163232 - protein, 63 aa, Heterodera glycines
YKIIWFFNHSEIIFQIAMRDRAFFCPCPTLPLTSSLSNCALAACCCLVLMKRKSRAKNLNIFK

SEQ ID NO: 163233 - protein, 194 aa, Heterodera glycines
MAATSATGFPVCILTPCSNSHPFEERRILVTRTEEDAVKIGRSVVRLQPSSNNAIFDCKVLSRNHAVLWANGAGHFMIKDTRSSNGTFINNERLSASGEENEPRELFSGDILQLGVEIIDTAKKVASGCVTCIVRLLNERGEECAGRPKPDHGTFPTLLQQIPPNYTLVKNDQLFILDQYIKEAQHRENQLGLK

SEQ ID NO: 163234 - protein, 133 aa, Heterodera glycines
MAVDASSATIRTRKYLTNRLLQRKQMVVDVLHANIANVPKDTIRAKLAKMYKVEKDLVVAFGFRTAFGGGKSTGFALIYDSIDSLKKFEPKYRLVRLGLAEEAKTGRKQRKERKNRAKKARGKAKAIVLGHRK

SEQ ID NO: 163235 - protein, 187 aa, Heterodera glycines
MRGPFMRGTMPLRRTFYYLGQGKIHLREEVKVFAIAFHNFPNVAQEGAKEFVFWHWAQLQFKNPHVQFVKLADVCVTPFVQAFLGDGREVVFDLECRTREQISEALIGTLGMTETVRKRMKMDSYKRENPAEFGCDCERQCICEMQGQHPCTAILYAPKHLRGSWRWNHSTYNPEKPVPFPPVEGYD

SEQ ID NO: 163236 - protein, 201 aa, Heterodera glycines
MQSVQSSATAAVTAASTVPLSIQNEILWIKQDALQVRNAVILLEQEKDSLRKAIRKLKLENGRLKTKVKTLNEKVAKISNEEMDDEEGKLAPESELDYDELNRGDFYLIGGVHDPISLRFEAAIRDQNAVEHKSAERYYWYKMAEFFGDEEAMKSILHAQNVQQAEEAMKNIKGFDVAEWDKVKLKHWEDGQRLKLEQVRW

SEQ ID NO: 163237 - protein, 234 aa, Heterodera glycines
MLTNKLAKCAAMTMTRCQPLNALAMLGGARLCHHTPPNCMDAIRPLGPKSSVPSFKGQAIVNAEMKTISYDDYKGKWLIFFFYPLDFTFVCPTEIIAFSDRVAEFKQLGCEVIACSCDSQFSHLAWVNTPRNDGGLGKMEIPVLSDFSKKIAADFGVLDKETGLSYRGLFLIDPNGTVRHCLVNDLPVGRSVDEALRILKAFQFFEKHGEVCPADWEEGGETIDVKSPKEYFKK

SEQ ID NO: 163238 - protein, 216 aa, Heterodera glycines
SCRIRHEVEMQPSAESVPPIDPIWRIGLYERHVFRSNGRVGALCLECGEMFWENGTDEKKRMGRALKRHLLTTHRQYGLKLLEQMLEEEEREKAEGRAEGGQIAKDANSTVCGTVHSQFVEAFHQTIVATETMPTELIEEKSQLKRKDVPNPEDLSYQIDARDEELSKSLPAAQTDGTLTSTECDANTSITTPSISADLWAAAQQLSTSLHNNNKT

SEQ ID NO: 163239 - protein, 142 aa, Heterodera glycines
TLSARVVSSSVKCAKRWGKRRALSRGRELQKACGSLTTADSTKRQLVANGEWGGRRTNVALVQKQSFGMGSSRLGLKGFSGIPWHSVVPSSVHIFFPFFLPFHLHLFVHFLYIFHPFVLFSYILFIHSFICLQIVLIKSFFV

SEQ ID NO: 163240 - protein, 211 aa, Heterodera glycines
  unsure (1)..(211): unsure at all Xaa locations
MVFVKAVKNKAYFKRYQVKYRRRREGKTDYYARKRLVTQAKNKYNSPKYRLVVRITNADVICQIVYSKIQGDFVLTAAYAHELPRYGVKVGLTNWAAAYATGLLVARRALKKLSLDDKYEGFVNPDGTIAEVEPLEDGPRPFKAFLNVGLARTTTGXPRSFAAMKGAXSDGGIFRPHSEQRFPGYDRESKELDTGCGPRRTSSGGHVGEYM

SEQ ID NO: 163241 - protein, 196 aa, Heterodera glycines
SLLSVVLFPSFCLCSLLLFLLPSALFADGFSSSGQRVVLARVIIFKASEKQGTIASQPLGTVDISETVPGKTTLNGTIEGLSPGDHGFHFHQFGDISQACKAAGAHFNPHGKRHGSKESEERHVGDLGNVKAAENGVAVVDIKDYLVALNGVNSVVGRALVVHEKADDMGKGGNEESGKTGNAGKRIACGVVGVIP

SEQ ID NO: 163242 - protein, 193 aa, Heterodera glycines
MAANWTYRIKKEGRNPAARLYPKQTNKEQQQQGGGPSNGFHDITSIGGGGGGGSALFHSSNGTAAAGLSSSSGSSPTILQQQQHRQFSSAISQQKSLTPPPLSVGSSTFNPTLEQLLQATQNISYSLSPLNSNGGMNGSGGEQHDGTNFNSNGTNNTNSNGGGGSSPFSGTTASDMLAVGGHRSVGGNAKTLL

SEQ ID NO: 163243 - protein, 100 aa, Heterodera glycines
LSIIFPYFSNFLHIHSNSSTQNAVVPKASFLAHFLNPFGHILNRPFITTLPFSSVRLPTPTLQLLLDFFIAIETGSIKILMNKKKKIKANIDICSNKIIF

SEQ ID NO: 163244 - protein, 75 aa, Heterodera glycines
  unsure (1)..(75): unsure at all Xaa locations
SFFFYFFLIFLFFFNLLRKKKFFYYYFFXFFLSLHPFLLIFFFLKFFFRIIVFLMDSRMNVFFYFFFFLFFLIIY

SEQ ID NO: 163245 - protein, 216 aa, Heterodera glycines
FNNLSSKFLKNGPFTKVALPFFSRFCFSTEAFEKAQKDMKQLKDEPDNDTKLELYALFKQANEGDVRGDRPKMLEFVARAKFDAWEKVKGMPKADAQHKYAEIVNSLLKNAGINNANTSETESDGIRRTKEGKVYKIELNRSDKYNAITWEMYEGLISALGDASADRETSVTVITGVGSYFWAGNDWANLTRGGKTSDDLRAMADRGERVLERYVR

SEQ ID NO: 163246 - protein, 212 aa, Heterodera glycines
IRQSTFNHQKALKNLTAIKEYVAHLEHFFDSPQMKEHLKTLESFPEAQLPRNFDARDKWPMCPSIHAVPNQGGCGSCYAVSAMGVAADRTCIHTNGTDGTQLSALDVIECCEVCGNCFGGDPLKAMVYWALEGVVSGGPDGCRPYAVSSACGTPCTPNLYAEEQTKRKCRKDKCQTAYYKNSAGGEYAADKRKGSFAYTLFPRKMSVDQAGN

SEQ ID NO: 163247 - protein, 208 aa, Heterodera glycines
  unsure (1)..(208): unsure at all Xaa locations
EKHGKVDKVKRIKDYAFVHFEERSATVQAMEALKXRQVDGAPMEVSLAKPQGDQNQKKKLAIKSRFNPQQYGAGVTPGIGPRGRKGYEYMGAFRGGRGGAGPSMHMGYHQPYPGYPPAGYGPPPYDPYYSGYRAYGGGGYDMYGGYPADPAAAYYGQHPAHASGSYGAGPGGPPGGPAAMRGGAAGYGAFGGTVQRGRGGKSAGAGQG

SEQ ID NO: 163248 - protein, 102 aa, Heterodera glycines
MAVRSSETTNEGSTILWSGMTAPKPLPSCLVGKASKGNGNFCCCCCCISANGFTLPGNGKSGERPSNSLYFPLTSNCCSPLKSTMTTSTFCRASVGPLAKKR

SEQ ID NO: 163249 - protein, 197 aa, Heterodera glycines
MVHKQNQLETTAVPIAVAHNDNGTADIFEQFEIMFNGDKSVFFGNETVTGSLKIKLKQETVLNAIHLHFIGVAKWIGTGRKEDKEGQTEKIYFDKNFVLLERPPGHPGPGHFKFVAHFAYSLPFECPLPSGCETSYESGSAHIRYFARAILETEQRDKFIAKKAFTIGSSPGLDQLVPPQPQPITCKETVRYGGCCC

SEQ ID NO: 163250 - protein, 214 aa, Heterodera glycines
GIFMSDHFWDENVFDLIVELEKEGRHVRLDWLSSNSALVDRFQTDIARLSEEEYSLYAASSSKLQRIAAAECAYKYNRTEELDKLFEKDRDSEALRETNVRHFLINRILDEFRPNIRRLSALPIERTIDAFCLNQPKDIEQHVLDVYDFLMDCPEAPAAAEAAAPSYQGGQESSGTAEQPQEAAAPEAPAAAEAAAPSYQGGQESSGTAEQPQE

SEQ ID NO: 163251 - protein, 293 aa, Heterodera glycines
MFPFNTPYNHLLNWSLVCFLIPWFYSYYNEQHRLSSMPVEQAMLKSWDTVISQPSIKFRKIMVGINCNVDVIVSGVSMVNKLNISSPNPIADKEVLNGFEDLYEAFVHFFTRGAPAERCMVNDAAFDRMVHTVEDKHLRAQHYIGGNAALMAQKIASSFPAATAYLVGPIGPRSHALLHPAIVRNNSTRIAEDELHLILEYKQGEILGEYVSPASSRFIVSHDQFSGSAMIIEMFFKAIMQFRPDLIILSGIHGLEAQNQDVRLEKLRLIKRSLMQVNPLIPIHLQLGSMADD

SEQ ID NO: 163252 - protein, 216 aa, Heterodera glycines
MSSHCKTLEEDEEWMANLHFVRSDIDPATVKPIDSRQLASLVNEFLLRSADILNRFCAQFENRMMELDFRLDTFERMLALMERKLENVNVDEVKKQSAEEKETAEKAEGMTRKEKGEETPEGTGEEKRTDKRQGKETAAEGTTKANEHPKLAKYFKMLKMGVPEAAVRQKMRSEGMDDALPNDPEKELPLESPQNKAQMVHDALAEDDESSSNSDE

SEQ ID NO: 163253 - protein, 86 aa, Heterodera glycines
MKPSFNFNLFASVFLVLCVASLVLCEHKRAAAAEACNPPKDVGTGNLALKRWWWDGHSCKQFIYKGQGGNTNNFPSKKHCVQVCKP

SEQ ID NO: 163254 - protein, 56 aa, Heterodera glycines
VANGILVGLCLTDVLAIGFSLVPSLFFFLLFIICHFLLPLTFVCLFLPHYFFFRLN

SEQ ID NO: 163255 - protein, 208 aa, Heterodera glycines
TQIKMFFLCPPIVLLPLTLFCVASHGLTNHSKAFGNESESNRTDFFGTEPMEIPRHKSADGFDPMVDDVFALLSAGEEGEEEGNGTKVGITVEEEEEEEEQQLLLRCADQLSPFVPLLLVPPHYHRWDFSCHFQGNQSEKPADLSPNNANENADLFLKMSKPCRSSQSFRDAITSEPNCHLFVGFVDHFHSFPTNTLVTKLNGKTMNG

SEQ ID NO: 163256 - protein, 194 aa, Heterodera glycines
MPLARTMASAAPAGAVAAGQIKSVIGTVVDVQFDGPLPPILNALEVQDHNIRLVLEVAQHLGENTVRTIAMDGTEGLVRGQKVLDTGAPIMIPVGRECLGRIMNVIGEPIDERGPINAKNKLPIHADPPEFVDMTTTPEILETGIKVIDLLAPYAKGGKIGLFGGAGVGKTVLIQELINNVAKAHGGFSVFTGV

SEQ ID NO: 163257 - protein, 205 aa, Heterodera glycines
AFSSFALSSLLPLFLLSLSSFVFCHFRPHFPPFLQKASVEQRRQYNRIVTSQNDTKAQINSNVQNWASNAGVASDYNNFTSEQQQRSQQFHDAVSGNLTGQALQLFNNLWSIRQNDQITRLAECQQIRAALNATGRDHVLHLLVPIPPPSIVGPPPSGCFPRPPYSKPFGGGFGPKSGGAAIPGRGGPQTPERRNNIGTEEGEEK

SEQ ID NO: 163258 - protein, 185 aa, Heterodera glycines
HNSTNLMELLSQQSAKSAAPVDGPQKLWHQINDENGTEACDRHNNGRRCCFCLDCRRRHCSFTISPIDGMEWLQQCHPSYGVDADLSAKRFLEEKKLNLSRRFQLIERGYVLKLKNDDGEGPGGGKAQRRRCSKCGCKGSLFDQLTVRLIAGSEIENEGKTTDEEEREGEQQKRSGGEEAENGAQ

SEQ ID NO: 163259 - protein, 162 aa, Heterodera glycines
  unsure (1)..(162): unsure at all Xaa locations
MSDCMTDDDAEEALRQFAEITNTDEAFAHFILQDVNFDLDRALARYYTADDPEASYKKFQTEGLDSAQNTGSEVDDEEGSGGTPNDKSKGKQPPHKRSRHEDESKESSKFPAELTLIXLECGRDGRTQFEQTILCGALHNCKNEPRSDFPARDDSTSDAPTQ

SEQ ID NO: 163260 - protein, 84 aa, Heterodera glycines
  unsure (1)..(84): unsure at all Xaa locations
ICASVINHWQTINQSLSSHLSSMAAASYFVKTSFISLRKWNASLSDIFPRNVSTISAQYXXEHGACPHGHLAHAGTLGQFQNIL

SEQ ID NO: 163261 - protein, 155 aa, Heterodera glycines
NLFETFMQAMAQFNAMFPNLNSSVVESVLRNCDGDVSRTIDELLRRSGQEEGNNSETDERRKSVSTPPRDQCANDEKIALLVQNREFLRYLRRDPNFQREMLGRSNSSDYRHRHHSSTHRRRNLPVLLTSSRTSQSPNSIRFFRTSADVMTNPAE

SEQ ID NO: 163262 - protein, 213 aa, Heterodera glycines
AFLTQITCRAKSQAHSMPAFWCHKCRSRCIALERYEDGVRCGRCHEGFIEEIDDIQEDHSQRSASDSPQQTPPPLVLQGHENPFGAFPGSPFARLFQLIHNNIFPTTTAAAGNDGRPTVLIHRRSASEGPSTATHQPQHRQAAATPPPVPMDQQPHTQRSHAQQQASDRPQPQQHEQINHNDLLTLFMDQFLGPIMNNAQMDNTGGRTQVIIQ

SEQ ID NO: 163263 - protein, 71 aa, Heterodera glycines
DCPVQSPTTNQQSTSTKLSTSPPPPPSPPSSASGRYPFGYLGQYAPLAALLNQFVQRSFHLFPARNLTEPQ

SEQ ID NO: 163264 - protein, 237 aa, Heterodera glycines
MESSDANNNINNSEGEAENTTKNGGEEGVEKKILSKGVSGVVKWFNVMNGYGFICRDDTNDDIFVHNSAITANNPSKIQRSLGDGEKVMFDIVDGAKGPEAANVTGPDGVPVQGSKYAADLSQRRRFAGPRRNYFFRGNRNRRPRHSEEAAGGEVPVGEKKEGAENNGKEAKKEEVAKDANGGRGGGQRRGRGVRFRGRRNNRRNVAGSTSGGTENEGEQKKEQTQPEEETKVNGGE

SEQ ID NO: 163265 - protein, 166 aa, Heterodera glycines
MSEFTSSDGSGKSVSSKVSESESYDATTLGKLMNLDAKVVEWLEKEPYTDDDPLLVLDFLGPFNNLHGDYNQNKAFLVQKLVAAGGARIAANVDNVIKFATWDMFFEARRILQADMEVRHFFYNPNPAMALQNNINQFPIVSTTVVTFWSDDSQKLKTQPCQFFEF

SEQ ID NO: 163266 - protein, 213 aa, Heterodera glycines
MMPSSPSSAPLGANVLVTGANRGIGLGIVKEILKTDGIVHLLAGCRNPSQAEELKELSKCHKKLKLIKIDVSCDESIANAVAEVRKMLGSEEEKGLHTLINNAGILEKEGGTLLAPDRAAYLRHFNVNVVGTVATTAAFLPLLRKAAATNSEGQTEEQQAAPVVRVVNIGGALGCIGKVFLKPSECPYQNMAYGMSKAAVHHFNKMFSIDQPD

SEQ ID NO: 163267 - protein, 156 aa, Heterodera glycines
KQLNISLHRTSVTLFSMKGPNDANSSMQFELRLVSGRTEFPSVFLATRANFLLQKGENRNSAIISLRDPLDGPHEVHLELVLRLSVRGIFAGKYMANLTVFVSQQKAQPHHPPQLQQKNSAKRHRRRRRTHRNREERGASGHRNGIRTVTEKIGGW

SEQ ID NO: 163268 - protein, 142 aa, Heterodera glycines
MSSGVEVPRNFRLLEELEDGQKGKGDGTISWGLEDDDDMTLSRWTGMIIGPSRTPFEGRIYNLRIECGPNYPREAPIVRFTTKINMNGVNQQNGVVDKRVVPSLRQWNPSYHIKTVLEDIRRHLMTAKENSKLSQPAEGSSY

SEQ ID NO: 163269 - protein, 283 aa, Heterodera glycines
PSWIFFRCFSAPPLLSPTFPNWAIRPRVSRPSLTGSRSAETHGKGKLRRRRLPKSDGAKLKRIISKLGYQRFSPQAPLCHPIDISLCRDIPYNRTILPNPFIDGLDPQSLQAQTEHFKPLIRTKCSPHILFFVCSVFVPMCPAQLPQAVTSCRSVCEEVRHDCIKIFHEFDFPWPAVLNCSRFPASPELCMRPEPTTPEQKPFHSLAPANRKARVPECPQDLVDLDPADPAAKCAFRCEKSTMFRKDLKEKARVWLMMCAFLNVCIGSFAVFSFCIHRRRFAF

SEQ ID NO: 163270 - protein, 156 aa, Heterodera glycines
VKPKLNLFMFFVNLAAILIFLQFYLDLTEAGIECQPNGVCRDVSGSTPASTVCSKKCYSCTYKNCCNKVYTSQYAKCSIKGWRKKGYIGNVPVEIGATKKRDVYCSKSNPCAKEGYKCVAYKKGDDRGFCWREKVEKAPPSSFALAIAIAGLVILL

SEQ ID NO: 163271 - protein, 278 aa, Heterodera glycines
MTLDDKLTFPPLEEQTARKRRERKHQKVISSGWKTNTLNSICFSTALLLCFAHFEHLQTDADYKFFEIQNISIRLQKDFLAGIVRNGHSISAVMFLLHIVATKLSETRFTFLGLLAVLSWPALFFVHYEQIHNRDYLISRLALSAFTLLISTALLFLPKKPKRKKRPNTFYSAFSVASTPLSQRSRFTRDSSVTDFVLDNSKRMMDFEDDDQSLSSKYSTKIVLQIESEIGRFWTSRIYCPSPLPKSLPRLPFVLFPFVLLPFLRILLAGVKKERKLR

SEQ ID NO: 163272 - protein, 95 aa, Heterodera glycines
MADSSKVPGGGKVVPRSAAGGGLRQRRAGGAANTGRTRTAGGGGGGGMNSGGLWRFYTEDSTGLKIGPVPVLVMSLVFIASVFVLHIWGKYSRTH

SEQ ID NO: 163273 - protein, 122 aa, Heterodera glycines
ICSNFNMNFPSRTRTQLVTDCIDYSNEIEGIIRAVPLIWQRFEEASKFFRVINKFVGYFPPLRDSFPTPGNETLDEILRCAGVGVRLLVEAESVSDYSLSNLRGALFAIYYSAVYYMPTTDD

SEQ ID NO: 163274 - protein, 234 aa, Heterodera glycines
MNKKFINALFHQQMFKNAVLLPFRHFAALTATQTHIDPVPLSFLRQSEDESEQKTTIMPKWKEEGLKIERNCSNRIFQTIAKDIVDECGLDNSAQDYALWVKAFGSNFSMFFALDQNRHPMGSVSIALYPQVAQWSMFFVKDRFRGHRLGSTLTRRSMELPGIRPVFCYGAADMWFKYAEDYGLNHLLDWRLWSMHANCADVRPERLDYDSSVELKEWREVSFDQLLSFDRLQT

SEQ ID NO: 163275 - protein, 443 aa, Heterodera glycines
MAGPDSRFILEFFNREAKELGVTQELLNNSQQSDQLIQAYYFLCDLIFENVGTTKENECEVATDLTRARPKMIIRTQQHSNLVFNKLFDGSNEFLYSDLLQPDPRRTKMHIAQLIRLYTTKCDIAKELSAVDNHIDEQMKAHDFEKNCERSTHAQLKDREEALNRMEKRNDEMGSKVRRLKDKLNDRQALAEDEKRNVERIDKILLGAQCENDECKELFAQEEENRKRLDNKILSSPERIIEELSNMEVEVEDIRRKNDQAVQNDRKLEREYGEQRVTSQCVESLINSMQQLEMMQEQMVEMRAKEEERRKQMDDLEMTRKNLVAEIEVLERQSTTDLESLGGEVNHRAKSLAMLNQQKAQLESDEKELAKQLKKKKDDIRQHQQEIKRKDRSFIILTDTYDDSVAKLFKNLSLVEQKVQVSRSNLLSLFDEKKSEIFGPFNQ

SEQ ID NO: 163276 - protein, 237 aa, Heterodera glycines
MASTITHVVFDLDGVLIDTERHYTTANERTLEKFGAKFTREMKLKMMGRKKTEAVTVLLKDAGIADRVTMDQYIAEYDKHVLQIMRALTEELPGATKLIDHLYAHNIPMAICTGSDNEEFASKMLKFDEWLKKIPLRVLCGSDPEVRIGKPNPDAYEVTIGRFAAKPTSPKNVLVFEDSINGVESALGAGCTVVMVPQREFLPNDWPEKELRSRPNFAALLDSLDNFCPKQFGLPDY

SEQ ID NO: 163277 - protein, 123 aa, Heterodera glycines
MHNFYFPLLSFVIFVYLAHFSDATKQKFLGGAHGNDVDNLDAPKQHILGGVGGEKQLKPDDAQPRRMRGAWPWIPPRNDTNGQEQRKFLGGAKVETVMIKPPEADDQKQQQTILGGVHGNDAN

SEQ ID NO: 163278 - protein, 84 aa, Heterodera glycines
  unsure (1)..(84): unsure at all Xaa locations
IFPGSRSRSRPFLGNLDLSWTWIFQRXVQEIKVQVKCEKKSRSRSRQNRKKPGFSWTKFLNLFFQVTDVCQVFKNNLYKFKNTL

SEQ ID NO: 163279 - protein, 213 aa, Heterodera glycines
IRTVKQKTRFAFPFFSSPIPMASAPSSDRFSSDHFFSDRSLRPQCLPNCASLSFGFVVDKLAQHCHCFSHLFECGQRIFEVSATELSPTNGFTSRVFRCEFEFGTFVGEKRMPTPKKRTMSAIAKVISLERMDTLWENFVGKKQMEKMRNSREQTEMIKSTLLQLHRNECNLYKFIGSSAPLPLPKVFYTQTAEEGEGVGLILMEDLSKSTHL

SEQ ID NO: 163280 - protein, 87 aa, Heterodera glycines
MSIVGGHSLRAEVIQLYKTLYHLGKDYPQGSRWFHERLKNAFARNANVQEEAKVRELIKRGEYVVKELEALYRLRKYRAMKNRYYND

SEQ ID NO: 163281 - protein, 156 aa, Heterodera glycines
QLSPRSGPNSARSPSSAHGVLHQYADQPQHQLDSARSLSIELASATHSLSNAVQMASTGSTKKMALHASECIEEMTRACDKLIGTRQLINNDPDISTDERRLLLEGVNRAISAFRQRLHSVLGNGDEGGAGMDDGQTSATAHVGKWDGEESGGLRV

SEQ ID NO: 163282 - protein, 373 aa, Heterodera glycines
  unsure (1)..(373): unsure at all Xaa locations
FNLTSDXWSGAHPKISEALLRHCDGGATAYGASVLDRKIERTFNEVFERDVAVFFVGTGTAANALSMAYVNRAGGIIFAHRHAHLIEDECGAPEYFTGGARLVGVSGAEGRIEPEALEEAIQRYPPNPVSVHAGRPMAVSITQSTESGTLYSLAQIRRIANIAHSHGIPLHMDGARFANAMAALGCTAAEMSWKSGVDILSFGASKNGCWCAEAILVFNDLQQAHKDFPFLRKRAAHLFSKTRFIAAQFEAYFHDSLWLRNARHANKMASHLTSAIRSLDPSVIRLAWTPQANEVFVVMRRSVAETLRKSGEISHFYEWNVPDGERRELKLYTEEGLFRLVTTFATKEAEVDEFASLLKAHYLGKSEQMRSIA

SEQ ID NO: 163283 - protein, 241 aa, Heterodera glycines
MSAVHTVENPPMPFRWPIEYGMQTGAEVIMTGATYNGQQKQFVVNLNGRGDDVVLHVNPRFKFLEDTIVLNNRSYAGWQKEERHRNKFAVGDTFRLRIVCHHSHFVIIVNDKEIAQFEHRMSPDSVRSLEVNGDVVLHRVNLVNMAQPASAPAPTVQPMAPAPQFGQPMYPPPPSQPFGYAAPPPDVGFSPSIGGGHYPSMPPYPSASVPQPNAPADASQWHQPDYGTPKPNAPYPPYGHH

SEQ ID NO: 163284 - protein, 73 aa, Heterodera glycines
LIFETTRNARNVSAVPIFAVFRSHHQFFPICRMPSVRSALCVKRWNGARDERHYSGKARKQKAVFSLRRSSDG

SEQ ID NO: 163285 - protein, 160 aa, Heterodera glycines
MSLSSIHHMSRLKLWMTPVRDNHFGLDDLKIFNSDGYSENAPFSRESSRNSSADGSIACNADAADAVINMKIGVWKPLPQKTCGFCYIQYKRHCQRLGVAFPRVTDKGFWVGHTTKDEHGDVICPELRKLKCPLCYASGKKAHTLKFCPLNSIKGRRDEA

SEQ ID NO: 163286 - protein, 248 aa, Heterodera glycines
PRAEFGTRNFVSEEELQKQREAGEEKPESSEPVDKRTLYERLKEQKDIKQLEYDETHALKNQFRGIDEAESDFLTQVERAKEEQEARKRKEEQELVRLSRQLTQQHATGATAEQQQHALLEKPQKASTAASSGISRQAALITSLVRRKRPLSTDSEPKSARGEVPSPPSSSDSDKRKTNEPSKASGGPPPKQRHESHCQIIGVLPGLPNYSDSSDEAESSNNSESLESGLPCVAIYAGKGAPKPHGEC

SEQ ID NO: 163287 - protein, 207 aa, Heterodera glycines
MSNQQNGDVAVPAAVAPNEQPNQNNQFQLWPFLKSILTRLVMFWLISSLIRNFFGPKQERDADQNTSLTGGGKTYPPSFNMFMANEHFDLFVYLSAKSERFHDFDNVESLFWHEHDLVYGDWTSGAIGDGSRQKAVTMMPTPEVLQRNGSLYLHVFLVKQGQSHHPRAKNYGGREIVYSSHQLNKFKKKYYQKTANLLTGKTGQSEL

SEQ ID NO: 163288 - protein, 188 aa, Heterodera glycines
YFESAQSVCLECDKSCATCHGPGPLQCDECAQGFANHTMGYCRQCCSPDQLTQKDLHCEDCSKSYPEFRTKSHLSMLSLLANFFTIIGLVLLGTVLFYLCRQLICCCFEIGRNGNRSDLEYTPLTTIGDDLDGRKKDQKQNMGFALEDDESESDSDNAESLMEGEKSSPEAEKEQKQQRKVPTEEAES

SEQ ID NO: 163289 - protein, 67 aa, Heterodera glycines
GPGRKTATNSRLNAMNMAKRVGMDRRGPLWCSSSAVNSSNLWKPANRPSANITFWQNLRPLVLTRKS

SEQ ID NO: 163290 - protein, 286 aa, Heterodera glycines
  unsure (1)..(286): unsure at all Xaa locations
MFLTPLGNVKNELVVCPTDFGGDFVFGMELEPSNSDFCASTAAFAPSISMNGPFPPMQTQMIRMPMPSLSASITEDQQMAYLLSSAGQSPSGSSQHSSLEGSPLQPNCHQTMLLSIGKYELNDRKMLTELSGEVKTDGAKKMAATDAAMTAPNSPGGRSSGTNQLGRTYSPGLPLSMVERQKIVQLFHEGWKICDISKYLCVTHSCVSKILQRFRATGSVRPKDAKEGRQESPLVAAIRDYRQRLGIMRQSEIREQLIRDGLCRRENAPSRSSIXNHILRTKLSGL

SEQ ID NO: 163291 - protein, 160 aa, Heterodera glycines
FFFFFFLTKKKTLLVSKQQMMDQFSLSNNTTFRSICPSIFAGISLFVVVLSFRLFLRTRFLLIRFFDFRRLVLCCCLTAINRHLTNQLMKHFRVLQQIAELDSATSRPFSIVTASSSLLHFHRSWSRCTHCARRRASVLLIVLSILSTLRRLVSCHGKTG

SEQ ID NO: 163292 - protein, 167 aa, Heterodera glycines
MSSQNGTDSSLLDDGQWLDGHFPLHHAVFDNDVPRLGQLLKEAAAAAAESSVIDREDTHGNTAVHIGCMLGHRECVKLLLEHGASVQSGNNLGWCSFHEAISYGDRKTIRMMLIALKKQSSGQLKSRLPLLGEHFSKLADFYMETKWEFSSWIPLLSRILPSDTFKI

SEQ ID NO: 163293 - protein, 210 aa, Heterodera glycines
ALKFVVLALAISAAAGKSSLSSANIQELQYRVEGCAADFPGRWAGSFNSSPQEQCVTNAKYNARNGSSPQNQIIKELPKCMLSAGAAESHITKLSKCLNKNILLPWTFVERDTGYTQLETFTHMFAIQDCLESSADVKNVDSLVGKTCAYQLYLQYGYGASEDAAKKWLEACLHTANVGKATDALKCYSSALTDPAVIQRAADYIAKMRG

SEQ ID NO: 163294 - protein, 209 aa, Heterodera glycines
MSLNHTLSSSSTILSAAAAGANETTERFRLALDDFVTVHPHLTCALIAVSVSLATHLALFVFARLFDFALAKFRPFVRRCRLRRGGGRSFRVHISDAPLLSSNGPFIHSQFTQHQQRASGKSQLLHKVPTIEADGGDDDGGIANAEKAKRTTTPVATSRQRHQQRGLRLSSSGSGGRIGTRRTTTTVDTTGAAAKAVPETAAGSKAAPN

SEQ ID NO: 163295 - protein, 225 aa, Heterodera glycines
MVFAGVNCSTNIRWVHRWAWTSRRLCSSTKIIYEQNGNPAEVLKLSNEKIDQNAIGANEVFVRWMASPINPSDINQIQGVYPIKPPLPAVAGNEGCARVEKIGSNVRELKVGDIVLPTNAGLGTWRTHGIYQSTQLFPIDSSLQLDSIATAMLQVNPSTAYRMLHDYAKLVPGDIVVQNGGNSAVGRFIIQMCRNLGFKSISVVRDRPQINEMKDELKQLGATEV

SEQ ID NO: 163296 - protein, 218 aa, Heterodera glycines
MLSSSACCTLLAALISAAFFAMANAQTVKQCLCSEIQPCSEKYMNTWKTCMQQCKGHFSSVGGDVEKLGHCLDSNQALLQSTIRCTQSHGDESCAKSPAAVKQVPKRYPETLEIATISEINRMINGMGLEGAMKGLMDAGKKAFGCTRKCMNTKAGNCEKTLKCGLDFPPDNVAVQEVKKCALNSGLNTANAQALCKCASAAGVKNLTPAICAKVKVT

SEQ ID NO: 163297 - protein, 111 aa, Heterodera glycines
KMMREIMTNGPIQVQVKWYVDAYLYGQNSTQVNVYMHTIVNQTDKGDYQEGSLKLIGWGEESTDKGELVKYWFGVNSFGTDWGLNGLFKWRRGTDECRIESKGISFGTPDV

SEQ ID NO: 163298 - protein, 227 aa, Heterodera glycines
MDQTDHSAVGPSSSSPSLPVSSTVPRNALLFDPAAPAEVQQQQNAAEEEDDQFYELTAEDLRKMLKALQDESKRQNSLLPTKLMKERDQQLKHKAYKHSIVRFRLNNGQILQAQFLSTEPVSALFIFLRQIISPTIRFELHQIPTTSGKLKSDDSTTSLLDAGITPKSVLILKIVAADNSPESPEQMNADQIFVADSFQSCTQTEAKAEAQKWLSSNTEFRPYLDTI

SEQ ID NO: 163299 - protein, 57 aa, Heterodera glycines
MVEVQQLIELIFCILLPPVAILLHGGLDILHLILNIVLCILGYVPGIIHALWYCFFS

SEQ ID NO: 163300 - protein, 173 aa, Heterodera glycines
MMERRNRTKNGGLSPTPQETTINLPVSSNRRASSASILFAQASFDTGLDVSRASQLSSQRNVLSTHVMDLGSGRPCSGIQCKAFKWDKSHSEWIQIGDTVTNAQGRIPLVHPGTSLSKGLYKLRFATKEYYARHQLKSLFPQVDVVIEVDDASEHCHVPVLLNHFGYSVYKGH

SEQ ID NO: 163301 - protein, 214 aa, Heterodera glycines
  unsure (1)..(214): unsure at all Xaa locations
PEYIFIFRDGLSEGQFAMACKEELRALKQGCVEYDSRYQPKFVMIVGTKRHFKKFFLEEEGRKGRPFNQNLTPGSIIQDKVTXADITEFFLQPHAPIHGTGKPVEYTMLEDEIGISMDELQGVIMALSYSHQIVNVEVSMPDPVYQAHELAKRGKNNFVTLKRFKPERVPKIDKQIVAKGGKRQIISIVDYKAVTRLLSYWGDGTFKLSHRFTA

SEQ ID NO: 163302 - protein, 289 aa, Heterodera glycines
IIDESPVAIGNGGTETQLSTPFRGVLDVRFEPGQTLTVKGIVREKARQFSVNLHSRTADFSGSDVPLRVAARVDRAKIGLNSMVNKMWGKEQRKGHSLKPGKPIDLRIRAHDKEFQIIIDGKAFKRYAYQSPLQSITHLSIDGDLAIQHIHWGGKVYPVPYETGLPHGFPIGKCLKMSGTPSLRKGGRFEVNLLRKNGHIALHLNARFDEKAVVRNSLEANEWGNEEREGKMPFERGHCFDLAITNEANHFGIFVNGQHFANFVHRSKPEDIFGLLIQGDIELTGLEME

SEQ ID NO: 163303 - protein, 135 aa, Heterodera glycines
MGNIVYSDKLSCYESADYCARSCSASSQCVYPDNCGDSANAHYACLPFDTRLLTWILVVSFLVIVLCCSALVVFYALRVIRRSFRNPVQTDGDIVFYNARNVHNFPHPAAMKQPTVEDDGRQEYYYNNSRRNDYY

SEQ ID NO: 163304 - protein, 156 aa, Heterodera glycines
MSNGTIFIDRDGELFAYVLDYLRTGKLLLPENFRELARLREEVQFYQIDQLMQQLIPFYNLKFPPKTPTGQNNGSVALTAAVAAAVAKTNALYETGGFITLGYRGTFAFGRDRQADVKFRKLHRILVCGKAQLCREVFGDTLNESTDPDREGAERY

SEQ ID NO: 163305 - protein, 211 aa, Heterodera glycines
  unsure (1)..(211): unsure at all Xaa locations
TAKRFPIFKWRINHNFHKDFSRLFWMKKCRPTFSRFCKCLXDSYHWLIVGDGRLSATGAANAGSSQRQFVLVQRLRHSTDGDAXGSXDDGLSTHNGIIQVTSWKRVDGGKLCFFQVLDYTLYSLDFPVIGNPQPHSGNPAEFRRVVQPQKDPDTQQTAAESVALWRGTQVKDEPENAWGGGGSAKRGRGSSPSDQRQPLRKRQPDAGAQMA

SEQ ID NO: 163306 - protein, 85 aa, Heterodera glycines
LLKMCPHLPKRAVVQGLLATLKRVKLVHFPFATHNPSSISKSHCAFTTANRNLLRRNWLPLRPFRPMQTKQQPNRGQQNTHKLLF

SEQ ID NO: 163307 - protein, 129 aa, Heterodera glycines
SASSPTTGSSAAGTSHLGAAVAPPKAAVASDSGALPTGTPTTTETPPSTTASSTTTKATANEKRIAEEGSGGGLAFVTMFMLLGISVSVWLLYAYFNPHTRSGQLLIKYRPSKWQIPSSHVRYSASVHM

SEQ ID NO: 163308 - protein, 165 aa, Heterodera glycines
MEAPAEIDEIYRPHEARIHEAFFNTLSKPIHSKNERRNRAEGIFTTSESQQDRERIHVTWRHFGQKTKFFLDRNEHDLFEALHRKIRSELPNFRGNLAFRDDNSREVILKCDRQIREAAARRDNRLHIFTTLSESPSLFLAASEIGTLSASRPSSRAPLGSPISA

SEQ ID NO: 163309 - protein, 97 aa, Heterodera glycines
GQGVILVYDVSNRPSFENLDHLLLEVDTYCTKSDTVKMLVGNKIDAERRMVSREEGLQFAKKHRMLFIEASAKTREGVQCAFEELVEKQFRHGQSVL

SEQ ID NO: 163310 - protein, 155 aa, Heterodera glycines
MFSQLFLFLIFLAFSAESAPRGEKKKDTPKDRYSLCRKGGVPIAKLNDQINGKDFDKLFAPLFPHPLLISNLLSLEGLKCPDKIAPFMKKCDAKKDGEINLREFKCFVKSLLASYLVDEDRNKCITEEELESFYKECGLKEMEEEMMGDGSVRKE

SEQ ID NO: 163311 - protein, 198 aa, Heterodera glycines
MRFVAVIGDGKAVDIFVKVAAVVSKLCRKRAVVRITPNEFSFVNVYNVREGMHVDFRIHKDNLFNSWSFDGLSLDNNAIFFELSTDDFVRSLHSRATQIKLKMTKKDGVPHLRVELSANSLVNEIPIVLVVLRQWPDFNPPNMGISQLAVALPNVKTLTKIVSGVKDIGGRHLIFRANNRGEFNIIGYADQAKVAVYA

SEQ ID NO: 163312 - protein, 130 aa, Heterodera glycines
VLSIYSKWIIIIAIFRLFSYFSSNSITLYFSFSCGPSTETVVVFSWTHSFTSSNFCLIVGSTDSISHARASDSSNACFAFSYPCCIDLSPSLNLSLIPSSKSSNIPPAFERSTAQRKKRQNAKMTKGRNI

SEQ ID NO: 163313 - protein, 68 aa, Heterodera glycines
MPAQSPFFLWMNENRERFYEPGMTQADVAKAAGEEWRRLPESEKAKWGQRSAEERGRQGGQDVEEEEQ

SEQ ID NO: 163314 - protein, 95 aa, Heterodera glycines
ALNPSTAKAKKRKTHSLGKKRTERRNRKRRTSRSRTAGRTSTKNAWTNLTTTKSAAKCRAEATNVCWRTQRRKRAKRRRRNRNIRTKRSKSVWRS

SEQ ID NO: 163315 - protein, 200 aa, Heterodera glycines
MDSPKCQTLNFARPFFPNNFVLLEVEKSVADAFSSSNMITDQFNHESLSLTIRGHCSDPLVVCTSSRTFGAKDVEVSNTLLLLDGTPNGAGANQQHIVSITNRFVELSEAFLPDQTFRLKALLEQNLLDFYNENAPAAEESKGIKLNELLDHVQISEQQLREELAKFAVVEPAEGVATFTRLILNLEIYLLCICSLIIVR

SEQ ID NO: 163316 - protein, 222 aa, Heterodera glycines
MATPPKANALIEAAGKFNKLFIMPPNRPTRIKKAMNILFGRTEEEKRVTGNFVSRIAERNPRREDMSTTQDWPSVWPTAQSFRSSVVPLPVRMGFRRRPERFAPKGPYGNLELMKIPNFLHLTPAHVQRHGQAIKKFCTKFPEELKQADVKEQYTPLRLVYSDYVHQGNNIRDKRAREVTAKIQLNSFGLKDTHAHNKCRQLVGDRYDEETDTVTFKADNCP

SEQ ID NO: 163317 - protein, 264 aa, Heterodera glycines
VGCASFGAGNKYRDCDFPRLIYPSVGSVFTDSYCWYVNVTCEEANYGLPAYIEFNENPSTIVAAPEPTLGRRITVTLQCVGNSYGQRVWTKFGVDGDPSAVVQVKTVRCGTKCATNVSTTPATLTSPNSEGLPYCRDSCAARIGHGTRGQDCDQTLLNNALIVYPSYPYILYGCWYVSVTCEAKANGNPIYIKLNDEEKTIVTSTQPPFNKITVNLQCAWNSYGQRVWSKTGVDGYPNRVIQVEKVSCGRNCGTTETSTIPTTE

SEQ ID NO: 163318 - protein, 183 aa, Heterodera glycines
YSDALLIIFIAFFTALLGEGLTWVLVYRSDEYKRLKFSMERKSKKLERKKDAIGAGGDAAGGAGAANAASKTTKRKIEREEERLKSTNRDLSMFRMKSMLAIGFVFAALLSTFSSIFEGRVVAKLPFEPITWVQGLSHRNLVGDDFTDCSFIFLYILCTMSLRQNLQKLLGFAPSRSFNRQTQ

SEQ ID NO: 163319 - protein, 80 aa, Heterodera glycines
MTTIIFNKGTVLAFFGFIFGFINFHVKVLNQIIHLSIQKFTMPLFDQFPPSVIENNFIGWNLNIQLSETLEKLLMVQVYI

SEQ ID NO: 163320 - protein, 209 aa, Heterodera glycines
FPPQSLSTLSLALLLSLVYYPSFEGRTNAYKQMLSIFQNAQEVSSLANLEASFKLDFTHLYNRLCATLHSERMPLLLLYLLLHNNVGFRNFVLSRINLEQLVLPVVRVLYDGMCSVPGHGFQRPSPTSSPKMRRQSQFSHNNSTVHTHQTYLALIVLLILSEDDFFKKVIHEMTIKNIDWYTLDRTTHLAETTLGGLIVLVFSKTIQIN

SEQ ID NO: 163321 - protein, 210 aa, Heterodera glycines
MDAVKAPTLASIHHKNRLQSPLNAHGHPLIIENGTVAETLVDKEEEELTEQVGTFLFTSESVGEGHPDKMCDQISDAILDAHLALDPTTKVACEVVTKTGMVLVCGEITSSATVDYQSVVRETIKKIGYDDSSKGFDYKTCNVLVALEKQSPEIAARVHEDNEPEDVGAGDQGIMFGYASDESPEAMPLTLVLSHKLNPKYHQLRKAAAL

SEQ ID NO: 163322 - protein, 148 aa, Heterodera glycines
MVQFDQSFQVSLRLWASSEFGSQGSHKTRQPFALPYAVTHFHALAVPKTTGVQCSKNGTDEQKLIAINSLQKVLAATAVGKCEHQMFQRRETLASKFEDYLARVILNNCYAKFGHNAINTHRKQQFGSIGILNKEVSVMFKEFGGFTQ

SEQ ID NO: 163323 - protein, 140 aa, Heterodera glycines
VIKMLFYPISVSLILFTFFAGSAEAQNDAGVLGPVEETAGQIGRNLSCSAIHAAVRAIITAHPDWHQWFYEARQNQSDHIETCANTESGDVHDYLSEQVDMLRCPESRSRLMTVSIVFIIAFLITLAVAITLGILLYRKK

SEQ ID NO: 163324 - protein, 100 aa, Heterodera glycines
QRFGESCSDIGCLLSGASNPWPEMQCCLFVVYEHAEQQKKLHVQRQFDGLVTIARQQEVDEQTAGTFSAVTSIGRPPTFTSTSRYTPAASAPSGSRTQMW

SEQ ID NO: 163325 - protein, 145 aa, Heterodera glycines
LSYHSNMISNYLKSQLELVEEHSTRLNERTQNWRQRKQTLSAREKEIVSADMSIVVPSDIKPRLRGSKFAHATEEERKAIAAQMEQGRDANRTATTEAKRNAARLGQAEAKLDQQIEAEKAYFDAQLEKLETELQFVASLLPKSQ

SEQ ID NO: 163326 - protein, 211 aa, Heterodera glycines
MASAKCAREDCGKTVYPLEELKCLDKVWHKTCFKCTDCGMILSMKSYKGYDKKPYCQAHYPKTVPSAVAATPEMEQAKRNTAYQSQVKYHEAYEKQMKGTKMEVADDPETMRHKANMVNQSLAHYHGELQKKEKQDSQRDTTAGSAPSVGFAVHSSPSLDSLGSAISTASSVVRPSNGSSSGNIGHVQQNIRRNSPQQHHQQQTYSYGQLF

SEQ ID NO: 163327 - protein, 254 aa, Heterodera glycines
MESGRSDEVLARLEAVRRRVLAAPMNVHFGGDPSQIRLGTCSSSASSPPITDIASQWAFLEQPIHQLLQCPADYGASEAQFGQSRAIVVGGADSAFLLQKTRFDDDWNGPSTMSTLLLAQYLQQSEGPLWNAVRGTGLAYGVSLYVMPDRKALSLDLYRCSELTKAYEQTRDTTLAVLNLDRLDTNLLESAKRSLICELISGQNTVKLTVTSAILATIRSLGTDFTLKLCSPIWYAKAEDVLAIGGPPIRRLFD

SEQ ID NO: 163328 - protein, 193 aa, Heterodera glycines
MARKNLCRKTFATFKQEERYPIVQRAIGARWGRKTIQTPNIEEEALQSVELRPSTSAEDFVESPPLTPSIATTSEVDVLSAETVEFGGSFSATAAQMDIFESTPSTSAVQMDIEETTPSPFTVNDRSQRIEQLENQLNDRDDKNLWEDAIAYDCEFEEQSQKSPERSNYILPALPNDCLPLSVPSASRLVDVK

SEQ ID NO: 163329 - protein, 172 aa, Heterodera glycines
ENRIKLIVADSKEERLCLAERNGADFVVHWDDSQFEEYLIMRTKDVATNGLHIVCDFVTSPRTGARSLKCLSEGGVLFIGGISGLDVQLPIKLVAKNRLAIMGVTRGSIEQLKNLVTLLSEGQLNAPNYRVYPVDQASQVLKQLSMSEVEGRAILEVFNPDTEVKKAEEEQK

SEQ ID NO: 163330 - protein, 295 aa, Heterodera glycines
MLFSSLNSSLFIRQLFPHRRFFCFSAFPQPIPLAFDAYPSTAEPEKTNPLVIVHGLFGHKQNWRGVAKALQKELGNRVFVLDLRNHGESPHLPQCTYSSMASDLRQFLEKEVFTVSVYKTAFLLGHSMGGKVVSEFAFTKVNESLIEKLIVEDIAPQRNSHSSLAQFRAYIQALRSVDLRLSRSEISRSLESKIPEETIRAFLLTNLYKPRGGPFKWRCNLDALSDNLEHIFDPLISRERVTMPTLFLHGANSTYFLEDDKIALRKIFSHANFEEIPEAGHWLHAEQPKMFIDSV

SEQ ID NO: 163331 - protein, 79 aa, Heterodera glycines
VYTDLKMGVAPSLHDALFWYNLHRDGNGDLRTRHAACPVLTGVKWVSNKWIHERGQEFIRPCPLKKEYNEKYVGDVRPF

SEQ ID NO: 163332 - protein, 200 aa, Heterodera glycines
FILLQHLNPQKMLSLIVIVCFFGIVPNLSKPIKLRNHSPMNVLFMAWPEARYPLELPFHRVDCFSEMERRHIVPQVITYRLENIKKLRNGICLVRIPTRSRVTVTQMNTNNVKSYVKFIAGSTQLSMPLHTDHIHSGQHEKFGPWHMPCRYAYIVFRSRSDQLEWVEFRLEPELKVDSADDQRNDCASEEHNFAESLLKH

SEQ ID NO: 163333 - protein, 234 aa, Heterodera glycines
MLKMRSVVPHFPPLPALRDFIYMYRMDADKTLSQNYLMDMNLTRKMVRRAGDLTNAFVVEVGPGPGGITRAILEQPCKRLDVVEIDKQFLMPLQHLSNHSMERMNVHRADVLKFDFEQVWTDAGAAKCSWVEEHPNFHIIGNLPFHISTPLVIKMMRQMSIRRGPFVFGRVPLTFTFQSEVARRVVGEPGTDCRSRIGVTGQNLTEPRILFNVPGKCFTPPPDHDVCVVQFLPR

SEQ ID NO: 163334 - protein, 100 aa, Heterodera glycines
MCCINSKMLLLVAAFVVLLCLLNQNVGAEKIIVLYNGKKYDLTEFHKSHPGGEEVLKKVNGKDVKEYLEGKKGVKTDHLVQHKHSKHTINEFLPTFEIKH

SEQ ID NO: 163335 - protein, 67 aa, Heterodera glycines
PFCLGRCGGRWACECAWGKRCWGPWPTAAARPLSIFPPPPPPPRFVLFALCGKIVAFFGSTVPFCLI

SEQ ID NO: 163336 - protein, 125 aa, Heterodera glycines
ELIIDVRCALKFCFLFRGSPRLLILSLPLILCPLPLLLPTLLPLLSQCKKRIFLALCRNPNCKSRAMVPLPVGILHSKTDRTLHWRTFLADPRFWPFLLRDGHLEECRCFAQSIAVVFWGENAAF

SEQ ID NO: 163337 - protein, 101 aa, Heterodera glycines
MKVKLYDHDKGPDADDLMGTTTTDEQGRFQVSGKTTELTTIDVQLRIYHDCDDGMMPCQRKVTFNIPDSYVTSGAVPAKFFDIGTVNMQIIFDHEERSCIH

SEQ ID NO: 163338 - protein, 246 aa, Heterodera glycines
MVVPPAPQIPKKIAEEHKKNGTQPQKEESKKDIGKKKQPQMAERRESSGESGKRGRGSGMSRESSKRAQGNSRKRGRERSRESSGDKGRKTMRRSSRSRSVKRRRRDSSSSSYSSTSRSRSRSRSYRRSPKRSPARDRRRDRTRRSTSNSSRSSSSSSASSSSQYSSSERSHSQSRSFTSDRDEEEERIRDRIIARTLSTSVTAAPAKQPQSKDDGVAMDEAMEYGPKPPESLEVSILNSDMEMSE

SEQ ID NO: 163339 - protein, 114 aa, Heterodera glycines
SIQFTKSQSFPFFLSFALPITSSPMFFVLSLPLSLLSEAESNSQTNVHVSVHHKARSSTQGTVAVGSVIAEALSAAQVAKVAKTDKKRAASARVSCQCLLGGKPSLVGSSHLAI

SEQ ID NO: 163340 - protein, 122 aa, Heterodera glycines
GGGGRKRGRNGTGGGAGGGDILSTLFNAVKGGDIGSLLGALAGGADVNAKDTSSGNTLLQMAIMTGITEIVKLLLNRGANVNATNAEGKDAVRIAQEQAEQAPDEDSKEKYEQMVQLLQEKQ

SEQ ID NO: 163341 - protein, 203 aa, Heterodera glycines
MVQRLHCTNPESVQSAQKALINAIGRQLITDFHPAVKNVASASQNLLRSFQSLSHHFYEYTAALYALGFSGINSDEFEVREQSKTLQTVTEVLKKVHSEQIDWMDYFTAMALTINQNSKTEKERLKALISGFSERERQLSKAIHRGKQMPDTRSNFYETELEAMRDQQSQRYRFFADKHLELLRRYHEWMKDSLLLLEKELNL

SEQ ID NO: 163342 - protein, 284 aa, Heterodera glycines
MAGKIFVVTGANKGIGYGIARGLAQQVNGATIYMTARTPSLGEKALDDLEKELGIKRISKLAFHQLDITDEKSCADFAAFLKKTHGGLDVLINNAGFAYKHNATESAAIQADVTIGVNYYGTKLISDQLGPLIRDGGRIVNVCSQMGVMGSQIGVMGNLYKQALIDQFKRADVTSDDINTFVEEYKKLAHADKRKEGGYPESAYCVSKAAEIALSVLQARELAKRNIVVNACCPGYVDTDMTSHKGHLTIDQGADTPIFLAIDQSVQKGGLFYYQRKPITWLQE

SEQ ID NO: 163343 - protein, 125 aa, Heterodera glycines
MPPPVSQKNPITVQLKLTNSTDTCSDYSLEFTNTCFKLVDQVKFHVKVPKTSKLANHWGIVPLATDNGTADQQQLFTLPNNVHLYPGKSFASAGISVNGADRPEIVILDVQSVLCTEKHDDAATN

SEQ ID NO: 163344 - protein, 130 aa, Heterodera glycines
LSDFLLEIHRQKHWTKHLASSVRFFSLFEPPPKMPLILCQMLLFAPWANFSRHSEKHGPSKSATSLLCPSIVTSSIWSLMSTHFPSSPLFVRSSPNTSICFSSVSVKINCINAKIIEQNKIKSFILLLKL

SEQ ID NO: 163345 - protein, 48 aa, Heterodera glycines
INLKRKPPKRDNNTAALSLIISNNNKMKLLIVLLCVSAIYARSLQKRG

SEQ ID NO: 163346 - protein, 59 aa, Heterodera glycines
EKTEFSMYLTSSSSPPWHGIIFNTNFAHLVFFLLGRVHQAYTVVGHYGKRICIIFEGAI

SEQ ID NO: 163347 - protein, 212 aa, Heterodera glycines
EDLSSKELAKCELYLDFVKIHDNTTVYRHINRILNLNAKDVLLEISTELRDIVTTVTEYHFPVIADRTSKLVFAYTIDVINPERDCAFHFPTNEFVALLCYIAACCPNLDTFSLSFLLQGEFSDEDFKQLSSWLYRTIQSVLSLRCSILCIDCNLTIEFRAFFPEATLMEANKTGHGLATMGEQRRTDDSETTEMDDTPDTYSISRKIQMRD

SEQ ID NO: 163348 - protein, 242 aa, Heterodera glycines
EDSMAMIPFNLFLLSALFFTANAYDLILKNISVPDELKDKFECTFEVKKGNGENECGLGELETDGRRNGELKWAEDKLCIKVKCEEKGNDTKFAFRLQQCELVDLKKSDKPMKRPIHLIDSNGCLASNAKGQWPKLNPPLNYSFEERTVEMRGWTFGNETDIGQFPDEATLSCAVEICADPCEQSCLDKISLDKCSLNDFIGDKNATDICHEGNAAAVQGTISFCLMTLLMFLCSSTVLMFQ

SEQ ID NO: 163349 - protein, 324 aa, Heterodera glycines
MSATTHSLSKQEIARFSRQLMLKGIGPSGQERIRETKVLIIGAGGLGCPVSMYLVAAGIGRLGIVDHDVVSIDNLHRQTMHDQKRVGQSKADSLKESLSRINNEANVVAYNVLLTSKNVLQLFRDYDIVADCSDNVATRYLINDACVLSGKPLVYGSALGWEGQFTVYNNGTNCPCFRCIFPDPPSPEHVMSCSEAGVLGPVVGVIGSLQALEIIKIAVSGKSSFAGNLWMFDGFEGISKRISLREKMSNCAICSENPRITELQDYQKFCRSDPSNKVRSLCLLSAEQPVSPTDIQICRTKKSRASFILLDVRPPTSFEICHFA

SEQ ID NO: 163350 - protein, 246 aa, Heterodera glycines
GAFSASHFSYSTSVTAASSANSKTPTNCSTISDPKTQRPQSSPAGTMAEGWQNRLENLEFIDDDIISGEECPLIRPNSSGKVPTANVPSNFLSNTTMPHKLQTTSTRKDSNCSVTSLLPNAEKESDKSFAGVALSCGGGKKAHQLNDIKAVVEKLSRLAFELSATRHHSSTIHSTLSHVRLKPSAKFELLDIDLEKFQTLQNSRSSASPSSAGTPSDQLPSKTRLQNVAALRAKVRGIARQVAQFE

SEQ ID NO: 163351 - protein, 206 aa, Heterodera glycines
MMSNAATPKLAKKVLRKKIGEIIAQQMAGENGRNIRERETATVAQKLLVNEWFPNSTRLSIYLSNEQEICTDDIVRTALREGKEVFIPRFKKGAERMEMLRLESENEFDSLEGTLWGIRQHSASLSPPSFEETSAKAPLDLVVMPGVAFNTSGKRPGHGREFYDRFLNEYAQKYRTVPRTIALALKVQLVDDLPIESKDRMLDEVI

SEQ ID NO: 163352 - protein, 195 aa, Heterodera glycines
MLPSMSKKQRKPEQNNRQLRIIEVQLFTPTARRYPHFDYEEMCKELGLEISKQKKTAESNSFHDQDAEEIVRRLEAKYGSQTVVSLPSTWKKPRKKTKKAIKFAPEDVMDKGLGYDLEDDFIDDEQAYDEWVPTTMDTAKRGHYVNKGPLEFRQIDFDQTTSEEDEEKDGEEESNGTRRETSILEADEEEAMNME

SEQ ID NO: 163353 - protein, 148 aa, Heterodera glycines
MSSFGTSSGGRIRQRGTVGGRGQFNLSGMVEPQQAFQPPTTHPADFSVSRGRGHRYLQNPLESLTHPCKLEVAMATPAEVDLSPAIREIKKDTFSVGVTPTTLTSVGKGPCVSCQQSEEVNRQLMAALLKDLGTSLVNFAAKLEQPSK

SEQ ID NO: 163354 - protein, 69 aa, Heterodera glycines
MEHVQAVVDPGKKFAKDSIRLVKKCTKPDRKEYQKIAFATAIGFAIMGFIGFFVKLIHIPINNIIVGGG

SEQ ID NO: 163355 - protein, 186 aa, Heterodera glycines
AKYFFYDPDFAFLSLGTYSALREIAFTQQLAQHRPDLHFYYMGFYLFDCPKMRYKNRFRPSELLCDHCFNWVPETECDRILEANGGRFSTFHPSAEPTRAELDSAQMDQILCLHGDPPRPLTFASLCNSLETAAAHPSSSTDSQRQNGRGEGPEMGQHDAFLTVDGIGPGALLRQLTDKVRTYVRH

SEQ ID NO: 163356 - protein, 112 aa, Heterodera glycines
RAQLENEVLVVKAYALWDNNRKTEEHRISIYSAKRLARPPSTATPSKLLGDSAAVKRRAANTIKRIRMQTHRPMHTFETPPPSIELSAPNPEAAGVVPLRRVILFVNLSRKP

SEQ ID NO: 163357 - protein, 116 aa, Heterodera glycines
IFSFVILNANNFIQRKNIFYDLEIFSILRNNFHRFRRFVCRSFVRPPISFLLSAYFPYHFGKSLVSLTTTWRFEIRSKSARGKASTEAKIKKSSERTENRREKRILAERKWEIVLK

SEQ ID NO: 163358 - protein, 186 aa, Heterodera glycines
MAGKFIGGRMPFRQSLLAPSFLTVSPLWPFPFRPNSASSHARVFDSEFPSSHSPKLRCVLSANNKTNSRARRYHHPRPQLVIFDKDGTLICFHSLWVPWVRSFAEKVEEAGIDGIAPKVFHALGFCPVLKKVKRGLLAEGTMRQIRDRVVHLLVQNGLERRESLNVVEKAIHGTSEGPFAERTVRQ

SEQ ID NO: 163359 - protein, 71 aa, Heterodera glycines; identical to SEQ ID NO: 162404

SEQ ID NO: 163360 - protein, 121 aa, Heterodera glycines; identical to SEQ ID NO: 133600

SEQ ID NO: 163361 - protein, 104 aa, Heterodera glycines
VPSADFFGGIGHRLSGDENVAMVFMLLMITILATNTAILIMQIVMFWTVISRPRAAAGEQQTEKKKTDNYKKMMSNTNGKVHLVSSPRNSAELLLFDRKGNAVV

SEQ ID NO: 163362 - protein, 77 aa, Heterodera glycines
LRHVAKSVWAQQFRHVLRPGRRPIADGVHKHGGVPKNCTLEHVLREGTLPGTPIGPCAHSTSHGNGWGQTHFRLRSC

SEQ ID NO: 163363 - protein, 234 aa, Heterodera glycines
MSSENPPSPMQRQQSSVQLQQSSVSDMGDPDDCFSMFLVFMSYVLLFFTFPCTIFSCIKIVQQYERAVIFRLGRIRRKAQGPGLFFILPCVDEYRCVDLRTVTCDVPPQQVLSKDSVTVTVDAVVFYRVFNATQAVMMGNISSSTTLLAQTTLRHVFGTKTLSEILGNFNKINREMKLSMDKPSDVWGVEVELVELKNVRLPHDMQRSMAAEAEAGREARAKMVAAEGDHKRPR

SEQ ID NO: 163364 - protein, 198 aa, Heterodera glycines
MEEQGPFLIDWRTLFGKAPFELRKQCIRGHLRNSHLRSIVWRLLLGVLPMEDRTQWVEVIGQERRNYTELRHRIESNPRINNSPEGKNFDGNNPISLNAESPWCRHFENQSTRKNIEKDVDRTCLKSSKQCLRQLHITVQSAEEAKASAPSTPSNVANSYAVQIRWLSSEFLTGLAYTLTVLCNIQYSNFERAHRYFG

SEQ ID NO: 163365 - protein, 151 aa, Heterodera glycines
MASENEIPDKFLGKFKLEKNEKFDEYLASKGVSWILRKMICFTTVTKIFEKSEAEKSKYNAYNQSSKHNTNWEGWKIGETFEGIGLDGKQHKITFDLSDNGDTLTEKHLRMDNPSDVGEVYRYSVDTDSGHLILTLSNESLTARRFFKRIQ

SEQ ID NO: 163366 - protein, 209 aa, Heterodera glycines
MFVKTFSRSVRNSTRFFYSTNTKLDPSKWRIEVALLIYRPPVVAPPMTEVEEQFYRMSEFANQKSSYKCDFELQLEKDEKLLEKRRQLENEGRDLSALDEEINVSSTQLRDDWFEKSEQLTKQYKLDSPQTTTDEDKNLKTFGRMQQKKLALLVKQRFPDALNSDYVSPWILPQLIRTGDDTLRQTAEKCIAHMFPNFDQMPIGFQILG

SEQ ID NO: 163367 - protein, 168 aa, Heterodera glycines
QKSNISDIRQSATARTQRGNPSHTIFFSVKCFISQPKNGETRAEVGCHNWSWSGKRLYWIFGSFPWRALCWIYSLKCRAVVAHWWRMFPAYYQSMLVVGRTNCSMKRKAKVAIGRNDSQHWHPSSSFVVWSFANPEVVSDFFHFDQSRGLTRSFLCFSINPCEKCAKE

SEQ ID NO: 163368 - protein, 211 aa, Heterodera glycines
MSPKQFKLTHSLFSFQRISQADGVKRKQMKADESICPPQRKKPSTSLKEADGSDGAVENVQTKENMRPILEAERHQQNDDGTGEIRSPPSSSPTPWHPSHALAEPTWQKLLRKEFQMKYMTNICCFLEEQAKQGVSVFPPRHLIFNAFNLTPFNTIRVVVIGQDPYHNLGQAHGLCFSVPNGQPIPPSLKNIFKELSSEFPDFVLPKHGTL

SEQ ID NO: 163369 - protein, 199 aa, Heterodera glycines
MANFPPNSDEEFDRGNFSSLSGMVGMNQRHLDWLMKNISREDMAELQQRTGQCARKCAVTYGGPIVVVTIGFLEFLRRKQNLPITAPRFLIGYPIMCLTSVALGSSIGFKRSGCGAEMRLFLDKLYAKYDSQMNAASAQMAPGVGGGTSPTKTYAQLREANRAGRPIELGQLKQQQTRQQQKKMDGSKATTEGTEGSGG

SEQ ID NO: 163370 - protein, 82 aa, Heterodera glycines
KFEALIPLLQMWYERLPMIIAAVSIPAFCTSDYYPLHWYGTNGCKHHRVLKGHEQSALLIRDRELTGYEYNLMGIDSIPEED

SEQ ID NO: 163371 - protein, 195 aa, Heterodera glycines
MLPSPSFSIQLVSRLFSQFFNRPLCSSAHLLSKDPSNSRNSGRDHNFFEGLYFEGEIPRDRIKQKYTLSSGPGGSNVNSHPTKAEIRFTVDEADWIPRRVRERLVERYPRYMNNRGEFAFTSQKTRYQIQNMNDCFDRLHNMLLNCSEELVKEEHRTHVSPQHISIMEERKKRSEEFRLASKNSHSRKKQNRRSG

SEQ ID NO: 163372 - protein, 112 aa, Heterodera glycines
IIEVPLNPTNPSQPNMEFVYEAIATLFTTHFKNLTEPQIRVTVKGFFSFNRTVTKMREHIRDFLVQIREEAGDDTADLFLEEKEAEIQRIQSLKQAIPGVRNPNELLEEDMV

SEQ ID NO: 163373 - protein, 379 aa, Heterodera glycines
QSLVTINYFMKTLSSSCEAVIFVFLGLSAVSKNHDLDFIFILVTLASCLVYRFIGVGVLTYLVNKRRVERIGLVDQFIMGYGGIRGAVCYGLVMSLDPELVECRNMLATTTIIVILFTVFVQGGSIEKLVTYLKVKQFEAHKKTVFEMIADNVSSHMVGGMESIAGLRGDYWFRMKLERYNKKYIKPFIMLNPNDKDMKIVRHNEEIQVKEAVIYLKKHGSFAGMPTVQSSRDLYSQQQPSNGIGAPRMSFSRLTVPQRTPQESIPRNESVGTFVRNKFAELQSSGHRYSRHYNDQDLRPVQHSFSMGDDEEPLDDDQHYKTFPYNKATQREAVRLINEARRKSSSQVRKSSKPTANKMDTLLESNKFIVDEENEEKEE

SEQ ID NO: 163374 - protein, 266 aa, Heterodera glycines
MPVVKPQTDSEFTKFLLNVGTAPCIVDFFATWCQPCSAIAPVFDELSNNYLNLKFVKVDVDKCKETKNTYGVSAMPTFIVLLNGQRVDLLRGADKTALQNLAHKWSKNCPTQMVSPIPGQCELSPLFNKIQCECLNEDDSNNLNNLLNGVGPLISDCDEQLLISVSFIQPVKVHSVLFNGPKEKAPKTVKIFANITNTLGFDQAQSTEPIQCIDLSEEKLVALKYVKFQNVFNLQFFVEDNVGGGDKTVVDEFRIYGTPIAKTTNM

SEQ ID NO: 163375 - protein, 115 aa, Heterodera glycines
FRIFNWSSEIKRFITITLKNNRIDLTKEFGYVPAVGFTDSLALISFSFCSLPSTKSIGVLFWRFFFSMLAPERAKSNATSICWSSHAKCSAVSPSLFGKSICKFFRQPNSKLTMR

SEQ ID NO: 163376 - protein, 176 aa, Heterodera glycines
MNKWRLDLCGSAGSRTLMLRSAAADQSLNPPGYNPGLSTTQQNESANRAEQQQQHLLSKRAWDLALQPVKSLPMNMFMMYMAGNTISIFPIMMVVMMAWRPMKTLMSVNAAFKPLEQEHVGSLWIHKIVFALGNLCAIALAVYKCHTMGLLPNHASDWLDFVPPLERAQYALFNDI

SEQ ID NO: 163377 - protein, 136 aa, Heterodera glycines
NNMERTFICLRPTNPSPVGRVIARFESNGLKLIAMKMINATRNQATEHYKEYRDRPFFNKLINYITSGPVVAMVWEGIDSVKKSLHLLESACFYNLRNMDECRDIVRHGSCNVQDAQRKINIWFSPNELRINSTSR

SEQ ID NO: 163378 - protein, 94 aa, Heterodera glycines
SNNQTWAHQFIHTMKLHESPAHLLSNDAAPGESQATTPCRQSRLDSDRSEAVAQQPGCSEAVAQQPRCSEPVAQQPRCSEPVAQPGCSCFRYRG

SEQ ID NO: 163379 - protein, 188 aa, Heterodera glycines
MFPRPSTSFPKILNRTKLCQASVVGSNRTMSSSDKLQQQKVLTVDTINPNVITMEYAVRGPIVIRAVELEKQLAKESLPFPSVIRANIGDAHAMGQTPITFIRQVIAGITEPALIKQQPNLFPEDVQRKVASLLRACGGGSAGAYTQSTGIDLIRQHVAQFVERRDGFPCDPESVCISGGASESIRNV

SEQ ID NO: 163380 - protein, 212 aa, Heterodera glycines
IKHILRKHCIELLAYKSKMTSRSAKRSLKKSDGLSGKVSVSKAQQIEQFFGIDEAKCETAERTSKSPSAKRSRNSTNTAVQLLKKMAKHKKELNSSKETRREEDEREMENIPDTLDELNSRGTEDERGKGTESVQTVNELDELLDSETAKRIQSESEVTIRFCCPLLANVGSVGQLFSIDDFSPLKTLSSSSNLSVPPFLCPFVFLFLSRPH

SEQ ID NO: 163381 - protein, 198 aa, Heterodera glycines
MANELISPTPPDIENIFKRLRANPSNKVCFDCGARNPTWSSVTYGVFICIDCSSVHRNLGVHLSFVRSTNLDTNWSWIQLRAMQIGGNANAVAFFKQHGCESNDAQVKYHSKAAAMYKGRIIDLATKAQQQAGSNIFFDALKEQQSPQSKGPNESEFFGSHETEEHTKEMKEASLSEIPHAPIQKTKKITLGQKKGGS

SEQ ID NO: 163382 - protein, 279 aa, Heterodera glycines
MTFDFEKRGDNADDEDSSADECSSSTGSSTPNSEYSVDEIIGHRIENGTDKWRVRWKGWAPKYDTWEPRENFSNSMHLLDKFDAKRLAGQCKENEAVATHPMSNNNNQSDYVKKLRPHRSLCLPPTSAAVPSAGRKGPKKKGSAKRTTAAKTPVSIPLLEAKAMLHTSRMPKDMSERAKECKEIRKFLLNCVKRTNASATAAAPRVLYISGVPGTGKTAAVLKVQKELCSEKKTPKFDFLNINALELSDPRQLFTKVYGQVQNNCTGTRKKISARNAQQ

SEQ ID NO: 163383 - protein, 107 aa, Heterodera glycines
LNTLFIRLHFNHPLFFFSTFFTNSSRHLIMHTNRRVPGCLSAHPQLSPASGGPMFLLLSTNNKFNSLEPKRNKTKRKGAKIIENYQNDNINKFCSNYPNSKKAQIYV

SEQ ID NO: 163384 - protein, 134 aa, Heterodera glycines
MVSVNGRKVKIVKKRTNRFTRHESDRYLRVKPNWRKPKGIDNRVRRRFKGQRRMPKIGYGNARQTRHMLPNGLRKVLVHNVKDLDVLLMQNKRYCGEIGHAVSSKKRKQIVERAQQLRIVLTNGNARLRTEENE

SEQ ID NO: 163385 - protein, 207 aa, Heterodera glycines
QPTNFAFQKSELLRMKEQAEQSGDVARVRDLQQQVNELEEKAKKIEHQRTKNLSAISAINQRNRDHMKQTFLGAGMVREEQEKDDDPFTRKSARMKVVSGSVKSKTAGEGSGANAELSVMDTMVSSLGSLSSSSESSPNKKVQLPSTHDLFNAHGIDINIDIKMPAVVGGSLRAPPITDSQAPRTQQKTSSSRTLTLEEYKKKRGLV

SEQ ID NO: 163386 - protein, 158 aa, Heterodera glycines
  unsure (1)..(158): unsure at all Xaa locations
GXSXPGERAPARGXVSPXXXXTACPGPRPSLSCANNNFRLNICCRRCCNCCCSSPATSSSSPPFPSRRCSSMPSSPPPVESSQRCCAVAAGAPGISAAAASSSASTSLSSTTALLLLMSCCCWCWFCWEMLSAAGSRENEVCCLINRWKRSGALCPQT

SEQ ID NO: 163387 - protein, 201 aa, Heterodera glycines
MLDQTPSTSSTAVTYANLSIDDRDTLMKNLQKLFKTHHQEQNVTNDQQPGSSTSKGTDSRTMKTAARGQTEFPFFTPRDSRYSTLKSTVVDGKALGCFIIGGECRLSFPQMRALCLGEIPTQKIDESMKLLAIVNALATEDQLTVLKRAGLAQPSLSKCELITKTNAERLISLLNSTGTSPIDEVQRSQLHSFRVVHDCFG

SEQ ID NO: 163388 - protein, 79 aa, Heterodera glycines
ERDMPEPNLPLPRKRVGFKEPHTGLVKNDFFGYWYLQYCLVTGLYMLEPWERKMFNVFVTGFIAVLCSAFYALWNALIN

SEQ ID NO: 163389 - protein, 265 aa, Heterodera glycines
SLFSMLPPLHAFLCLIFFVSSSISPHSSASSVHSSEDELSQMLSSLWHIDSEHRKLFHNEFRISSTDDRGRLVAVLPRPSVLSRPIVTAFGQLCNVLQSVNPNQSNNNSLRQKVDLFLAEMDKSPIFKKASEFYSAHRLSNSKSFKQKFHSLWFFPSSSIPFGSLMCRFSAFSGNWLSFISAQKRMNVKRLVVERESEDMALVEFGGSDAGGANVADMRGNAQPQKRHFALGDSVEFELSALTLCALLRRERHQQKKRCSFKTDE

SEQ ID NO: 163390 - protein, 156 aa, Heterodera glycines
KLTPFFYRSLLLSSSSAACVANVKKGSQIVSESDVSPFGAAAPWVDAHVETRAGQKGLLLLQIGRIVIIGHGFNAIGEEQIQKKPKENETHRPDLGVEFEVERCTKNAMPSHFFVGVKRRLEFFFFFFFFFFRRSTIFIKNKNPDYLRNPETQGCY

SEQ ID NO: 163391 - protein, 203 aa, Heterodera glycines
MPFLGPFFVFVVSPFFVFGSAYSEDEPVTCGSVLKLQSVADNVRLHSHEVKYGSGSGQQSVTGNSNSDDVNSHWQIIGPNSEPCQRGQPVKCDSSIRFMHLQTRCFLHSHEFSAPLSRGMQEVSCFGKEGQQSDSGDHYKVVCSGDVWTQDEQIKLKHENTGNYLSISGQQFGRPISGQREVIAAPSDGHKSLWIAAEGIFIK

SEQ ID NO: 163392 - protein, 111 aa, Heterodera glycines
MRTSLLIPLSLFSLITLLFIVSFSEADIEMDSLMPRTKRQCCGGCGYSGGYGGYGNDGGGQCCDACGQCGSGGYGSGAIIITTGGGGYGYGGYGDGYCYSCGGGGCYGCCG

SEQ ID NO: 163393 - protein, 189 aa, Heterodera glycines
MSHHTQIQQYFCPPSAPAVTYYNYGNITNIDLSPQQAVPQGFQQQVQLTAPAYTVAQYWHNVPSQNGGYQMPQNNGHHAAAYSSGDHPKMGKHKGIGKRFHPQKHQQRASAPHGIRRNGKYSAGATTKQQQANADDTDHQPSAAQAAQIIDLLSELLAEFTNFSAEFAQFASLMQENWAQTQRPIKRTN

SEQ ID NO: 163394 - protein, 309 aa, Heterodera glycines
HIETHSNGGASVLRCDWRRLKHDLSSQELNEFAEEFIDLGLSELSKVPLFVMCVVEHGIEYLEDLLEYLGTKHSNMPVKMGSLHNKQLVETIQIGHYYEKVISSYKQGTYRCGPLKEITLVGKKQEECGAYFEHLIERLEECPFLRILLPWSERTICSDKRPSESDDGPIYWCRPGEQLIRTDESKFDEIKSKQHRRGSAGTKQTKSAGIPLKALERREILFEDRTPCHADHVTDENKAHTTAAVGLLQAVRSPTEKGKIGDRLVKDVICFHAADFKRVTDILKLDLYEPPMSQCTQWVEEAKLNTLRR

SEQ ID NO: 163395 - protein, 195 aa, Heterodera glycines
LSKCIVLVDYARQRQEWTFNKVSQLSTSVVELRNKIETEATRTRKNPGEVLLKIIRFYSSKLNVLMSKLRDRSSEVLLSSSMQKQILTLTAYVQQLDDNFVKAKDIDEVKQEVLEEAKQKLFDIARWSASLSLRGPPKTSTADDGENENLSSNIETEPKQEETKGEEEETLQQSMKEDEEEKGEEEEDEEEEEED

SEQ ID NO: 163396 - protein, 224 aa, Heterodera glycines
CVYCIMLYCNEPFTVMWLITVIIDWSLLSLLDENRPFSLGWPQSIGQLAVGVLTGATAAATEAGKRPRNASAKALRAETPAGGHETDNWPTDGLSDGQSADGGQSEGRKSAKDEDVSLASVGVSKFVVVWACLFAPSSVCGIFPILASTRSPMARAWEGLHAGGKADIGGRGEAAEEKRLLFSICAGGSVGSARAPFTGFSRRTNSEFPTHKRRNKSPTEKSNR

SEQ ID NO: 163397 - protein, 219 aa, Heterodera glycines
MFSARSSFTFLRIFQCFARRCRPSLAGNATAAAQAQPSNANQMRAWAVNAFNAPLVHSNVPMPTIQNDNQVIIRVKAASVNPIDVRMSEGYGNEVLSKIKCLTEFVDRGLPKRMDFLQTQQTIGETFSRMGEADQFPLILGRDCSGEVVEKGRAVKDLDVGDQVIAVVPPHCQGCHSEFALSFTNAVAPKPASLSHTESAALPYVACTAWAALVTTGRI

SEQ ID NO: 163398 - protein, 134 aa, Heterodera glycines
IHFFIWFRPTTRNGKAHKKGRHCREVRHSVRRLVAEDSQKDGGVSTCQIHMCILRQGGHEASVCRDLELFQVSQESGRRRLRVRHHHRGNSAKHHPPSARDQRVICRIPTAENNGGDDDFCTPLPLFFVVMCCF

SEQ ID NO: 163399 - protein, 157 aa, Heterodera glycines
  unsure (1)..(157): unsure at all Xaa locations
GGYLLACYNNDSEQYESIAKIGTGFKDEDLKSQFKEFQELRIDKPRSYFAFDPSLAPDHWFEPSVVWEVKAADMSISPRHLAARGLVDAEKGISLRFPRFIRNRADKKPENATSSEQIAEMYRNQDHIKNQKDXKVDFDEEEEGEEKKEEADDEKEE

SEQ ID NO: 163400 - protein, 279 aa, Heterodera glycines
MPGIKRLFDGILRFRKTLRPSMVKEFEKVRDHPDPSAMLFTCMDSRLQPSKFMGAQIGELFVVRNSANMVPVAKSFGDSGGEVSVTTEPAALELAIRRGNVRRVVICGHSDCKAINTLYDLYHGRPFDAESPMDHWLRRNGHQSVHKLTQLLMAGPGTELEFASENGLMAFCAHIDRTDQLNAVDKLSQINTLQQLTNIASHEFLREYIVTKKVGLDAMWLDIFNGKIYIFSRMQKLFLPIDEKTSADLLREAIGQIEEENENGGEKRRECRKERHGRT

SEQ ID NO: 163401 - protein, 147 aa, Heterodera glycines
LKENGIDRSHQRSGKSGSLEPEQFRKLFIGGLSLNTTDESLHAFYSQFGMLVDCIVMRDAQTKRSRGFGFVSFQTADEVDAAMSARPHTIDGKVVDPKRAVPREQSAKAESNVSTKRLYVSGVRDEHDEESFMHYFTEFGPVAKVEI

SEQ ID NO: 163402 - protein, 219 aa, Heterodera glycines
MVRISVDVVNDAYQFINPCKQREISLRNLQIPTIENLGVTRDQFDVIDLTDNNIRKLDNLPRLKRLETLLLHNNRVDFISKEIGDQLTKLSTLVLTNNNLAQLGDIDVLASCPRLEYLSLQGNPLTHLPKYRQYVIYKLKNVRVLDYKRIRLAERQAAKKLFKGESGARLKSELVKRSQQISEGGEETEQPPKKRATEEQKKIRELISGAKTLVDVERV

SEQ ID NO: 163403 - protein, 208 aa, Heterodera glycines
KMRKKKCGYKVHEYQGFGIPGILVKNPGIRSRFPSFLTGKKAGNPSRFFFVFPSGKFFPALSKYCLLHFKMLPLFVTNKLLTTQIVRTNLSLRLPSRQKNFGPNYYTEKQWWITRKIKKLFMRFPILERTLILGILFSTLAIPFITQRKKLLNMRNNLSDDEWADFTQKHKATILARLKFGQNLHLPFYNKDKALEQDEQTQKTFMDS

SEQ ID NO: 163404 - protein, 113 aa, Heterodera glycines
TSRNYASNTELSDDASAGEMERENRRVRSNRLSQQRYREKGNEARNLLPQLYSRIAELERENNLLKDLLWRERDPNSFAVAQQQKMEWNRANGQTMDMENAFPQRAMSETSVN

SEQ ID NO: 163405 - protein, 213 aa, Heterodera glycines
MDMNLTNGGDVVSVQQRQNGGVGPTSLSSFNSFRQPVPPPPPPQNRLSLNVDFADRTSASSPTPLPPTSPIPKIQPQMLQQQSSNNFHHHHHHNLHHQQQLSSSSTFSTSPSAKVPMPPPPLPPPPPFIRRPVVMPTENLSPSNNAPLTNGRGVTSPKKSSSSALRLSFFNGSPLNFFNNSKVVAEKSVPAPPISPPPKAMPSAAETNGLSNG

SEQ ID NO: 163406 - protein, 208 aa, Heterodera glycines
LTDAGQLVALTGASGVDRTTLFNTLLNRNLKSLSVEGQLLINAHSLGQFINYASGVFGSSFVVSNILRVLSGFPIVFRIQKADRRRYTPTERMRDMQQNINELIRINRVNAETIQSQAETIRILMGLPGVRQMYDEHQANANQNANQNANQNAPIQNIQYAQPLQIAQAGNFQNLNQLPNLQQNQQQYGQYPFVPTPLGYPPAPQGNP

SEQ ID NO: 163407 - protein, 202 aa, Heterodera glycines
MRSVKHGGKKGMRFRYKLSAVKRQNKKQKKKQRNIAGCSLIKKAWQTQLSSRQNLSAMGLVYDPNEALKKNPEFAMEMDQSEIEVIGLPEAKALGSVKEQKKATKSKKACPKLNKSEAESSKVVLELQQIALEGAQQMAEQKQRKRERAKLQQSDIEFCQKMLQRHGENYEGMSRDPLNIWQNTPRQIERKIGVYKRSIASD

SEQ ID NO: 163408 - protein, 281 aa, Heterodera glycines
MAATIASHAPQMKQQNVQVAEEETFGKTNGGMPNGAQKQQNGQAKEKQKVGQTAPVARPLTVKDWDYDERGQCGPKHWLRIAKCEHLGDHQSPIDFQLSKMRVHPLNIHPLCLVNFKKPLAGQLINTGCGIQFQPDPQIEPPEIYGGLLDQNYRFVQYHFHWAQNDNEGSEHTIGGLRYPAELHLVHQGVKNPSKLAVLGIFLKLDNESENGEKKKFVFSAEEMEALKKVIEFEQNAAIDTEHSLSSKLPPNCCQEMASSAEHFVSSFVRYEGSLTTPPCS

SEQ ID NO: 163409 - protein, 229 aa, Heterodera glycines
KDSVDVGSVIITKLDGHAKGGGALSAVAATRSPIIFIGTGEHIDDFEQFRVKPFLQKLLGMGDIEGLVEKVTEMGLEDNEELIKRLKQGQFTLRDMYEQFQNILKMGPFGQIMSMIPGFGTDFLSKGNEQESMSRLKKLMTIMDSMADNELDHPKANDLFNKEPTRLVRVAKGSGTAPQDVKELLSQYKKFADMVKKMGSIKGLFKGNEVNPRNINQNQMARLNQQMAK

SEQ ID NO: 163410 - protein, 74 aa, Heterodera glycines
MVERRKESPKRRRRSSSSSSSGSSSSTGSSSSGSSSSSSTTASRSPSPKKQRAAARPSARDDRTTRRSPRRLTC

SEQ ID NO: 163411 - protein, 111 aa, Heterodera glycines
VKLKPPPWTLQWFKYDVKGIEDTWTLATPWFKRKFIASKDLLELRKYDVIRHYREAGQELEHDLKVQKRMLEFIEEYRRKRGEPKRKLLKSAGGKLREISLFVTSEDVKSK

SEQ ID NO: 163412 - protein, 231 aa, Heterodera glycines
  unsure (1)..(231): unsure at all Xaa locations
PAQKVFLAQKMMIAKCNMAGKPVITATQMLESMVNKPRPTRAEVSDVANAVLDGSDCVMLSFXSAKGDYPVESLKTMHDICLEAETAFFHSRYFEELLQNTPSPTGPGETIASAAANAARRCRASAIIVLTTTGKSAQECSRFRVPIPVLAITRYEQVARQLQLCRGLFPLYYPHMERDTEWTEDVNKRIAYGIGVGKERGFIHNGDFVVIVTGWQAGAGSTNTIRLQKVE

SEQ ID NO: 163413 - protein, 108 aa, Heterodera glycines; identical to SEQ ID NO: 147910

SEQ ID NO: 163414 - protein, 107 aa, Heterodera glycines
LSFVERTVQSLLDKKMIVRQEIDMFEATQIGSATFNANFNPQMALDMCNDLGANLGKGIVLISHFHLLYNCVPLDVAVQVDWNLFYNEVIFGAEQRGAAANSFDGFA

SEQ ID NO: 163415 - protein, 243 aa, Heterodera glycines
MHEAKIIVGIASLCSLAAILATLVVIPQLYTQINEMNNRVMDGVQAFRVNTDSAWTELMEVQISVTPPTRPRENPFNSIFLRQKRQGLPPQCVCQLQQPSCPPGPPGPPGPPGTPGEPGGAGQPGSPGQPGQQAPPCPPPVSTCQKCPAGPSGQPGSQGPPGPPGNDGQPGQPGQGGGQGPPGPPGPQGQPGQPGQPGGPGQPGQPGQPGIKSTTIPGPPGPPGNPGAPGQPGSPGQPGNPGG

SEQ ID NO: 163416 - protein, 196 aa, Heterodera glycines
MNICASKCCLASPIAHRSHSVAFPPFVRRFASHGHDDNKPHPIDDPDIPRQPDMYRPGSDSFAYENPWPMLNKGRLDWLFNDGWRRPLAADQGAHMRRQWIYFKCIPRDEHKDWKKWHGTMPIFGTGCFVMLTFVWQYCNSDWPSAKEWALREAHFELVRRERAGLPLISPDLIERSRVEAALPAEEELRDFEILI

SEQ ID NO: 163417 - protein, 81 aa, Heterodera glycines
  unsure (1)..(81): unsure at all Xaa locations
LKPEQVTVQNLLIENGQLIETVAEYQRMGKIVEATKYQERLHRNLIYLAKLXIRHVLLTFYWKSVERYPQRMSRHRQPNLC

SEQ ID NO: 163418 - protein, 195 aa, Heterodera glycines
  unsure (1)..(195): unsure at all Xaa locations
DRAHRQEQQQEKFYSQQQMSEESEEALFCISKHDVKEISQVVKAMAFRDHCTLNVSNEGIRLAVDDQHNQQGSAYFRSEHFQDFNFRTQTCSIKIPMRPLMEALNMFSGTMTMVQISWNGEGFPLLVILEDEGXGVVVHTEIRTLIAPEILEFDFDNENVTAKAILNSLPIREIMRDLDDSAETVVLTFTPGYLQ

SEQ ID NO: 163419 - protein, 223 aa, Heterodera glycines
KNQNADIEHLSTHYELDQNLFKNKTLREFCAAIHSFYGKCSTNILDHFKKRFNILQFARHLPHFFVGLNSTWIYEFVVLLETTGLNGHILDNDFEMDDNDRFIVNTQLQLLLQEAFRVSWLQNSPFHDKICVSLMRLSPTSDDRLAEHEKRLEHRLKNPPKLELNIVVPKDNASNKNKDLALSLAFPPVVVWSYRQMFYHLLLLNRAKHWMYRKYFALKGTNC

SEQ ID NO: 163420 - protein, 124 aa, Heterodera glycines
FSVLSFLFVVNLISFFFLTNNLCCVIEQMSTVSNGKAESSMRRYIYILPYLPTGIASYYFYKAAQLARKWATVHKFGPFKVSAAHGFALLIPMPHLVILAFQIAYTRMTRRTDEKIKMKQNVSK

SEQ ID NO: 163421 - protein, 200 aa, Heterodera glycines
  unsure (1)..(200): unsure at all Xaa locations
VAVDLAAIIVEKNVNSFLSVVDIPKPSLYDYFAFLFALATILWANLLCKSDSNNIFKVHRLMLVLVFLKSLTLLFHGVNFYFVSVYGHERELWAIIYYVTHLLKGALLFGTIILIGSGYTFXKQFLSDRDRRLFIFVLPLQILANIAMIILEKSEFSDQRYLFWLEMFTFLDIVCCMSILLPILWSIAFLTECAAKTTDG

SEQ ID NO: 163422 - protein, 204 aa, Heterodera glycines
PPPHPPPPPKRGHRRPPSPPGRAPSPPGSPPPRPQRPPRSTRASRRDGRLEQWEKRRNDIQRRQPVVRDLLAEAAAAPLPESDTDDDYMLESGLALPAPTQYYGDLPVLPYNAQREIEQMDTDQQRIAIRRKLKKDEAYDDDSEHKKYRVYYPPSPPRLPLPPRAKAKIEPPPSRPTAKREPQKPTKLELKPSKFEPDSRPKVA

SEQ ID NO: 163423 - protein, 184 aa, Heterodera glycines
MFMHHIWAHVAQQKHTDSEEQFINMQAEQHNANSIITNGTNNGTDTATGDEHLSDVSRLHMCPECLLEQPTPHRAHLHYHRVHKRGKRHLLDKKPGLLHVCNICEQVFDAKAIASHCAVHHLPDKGAQLALPYGCRFSAGVKCQFRASNRSALLRHFYVRHVGTHVVLCPFCLLTFPVPPANKR

SEQ ID NO: 163424 - protein, 212 aa, Heterodera glycines
MSNFHLSSKVLNYIDTRPKENEVKGAIKLDVNLRIFIKNERSVEKEKSRKEMATNIYATLDKKEPLAAFIARIGDTLALTEEPENYALMFEEKRRFVTEYNKPSVAQGFFLLLTASPSNFAKHFLAQLGQGSCSAWPHLPLFVSLCADPAFAEAFTALNGVHCLAEVIEGFSDEWHPFEPNAPPLFSLMRSLLTFMQQFPVLCPWADFSPQF

SEQ ID NO: 163425 - protein, 108 aa, Heterodera glycines
IFFLVHCHSQRFISQIPSAVPFSVRLPPPPPVLLFLCSSADLTPSPPFGPQLFLISAILCLFLLLSASSSAVILQLLLSVFCLRFRPFYNCIILSIEQLWHYFLLLVC

SEQ ID NO: 163426 - protein, 164 aa, Heterodera glycines
MARQQLNIRRRSVVSYVGISEHGQCGYCKFTKRAHDKAKFAASTSECNASVDASTVASSTNNDGQQQANPPNAHDENANDDTNGGGDSAVFGLWAHRLTVHHYQWLANRGWRRSGRFLYKPLMGRTCCPQYTITLDVHKFRLSHTQKRVLRTMRDFLRTDQRPK

SEQ ID NO: 163427 - protein, 216 aa, Heterodera glycines
MDKQTFGGDSSANSAAEDKMSGCCSEHIVEIEWKHFDYLSALSGLYTASVERRKCNLLVLVQGNLDNLEGKMVILTIHDVGKNHLSFVDFVNSLSMAPLRGRSLFLHICVPGQEPEAPIFAGSSFPSMDQLGHAMVQVLRHFKISHCFAMGEGAGADICCRFALDFPSMVRGLVLIHCTSTTHGIVENIKEIFAGLRLEDGEMTHSAWNYLLTHRF

SEQ ID NO: 163428 - protein, 212 aa, Heterodera glycines
MLERLPSQLVSRSASFVQTRMTANTVNFFMRRTGDTLWKTVTNVSMGGMKRGRARTRQPIRPLPQFYRVGMLKSSPMRIRYPGLNAPIVPQSVAELASRPFFVEEQSEQEREEVLHFVRTQVANKSSQKRHLCKERLTPLERGFSGSTFMGQRMGPPPDMDGANMDDFECICLFTDRITEMHSIRGRVFSTRALVFVGNGNKVGGFALARAS

SEQ ID NO: 163429 - protein, 246 aa, Heterodera glycines
MHFVLIAFCIVWQLVVANNVEQPANRAKRFTSFGSLSTIGGRVGCVVSKNKLFVNGHFTKDLSEDEQEELKQYQEQLDQFKSEVKTYLEERQKQFRNQVARQGGAEAKEGGTQLKKPEPPKKPSFCSDKATTQYVFDGCSVQGDNVYIGDTFVRKLSPDEQKELAQFDQKFTAYQKAVTAGFRKQVEEMFGQHFGALFGASNLSPSTAEDKQQAVPSSGAELAPAGAENGTAPEAPKTPSFCTLLV

SEQ ID NO: 163430 - protein, 319 aa, Heterodera glycines
AQRQSGTNQRQHKNANSSGKPTRGRPTLPCGSCGKIDHWRSDCSFKDATCFKCNKKGHISTICRSKKKMAPPNSHRSFHSVKVDANCLHVGTTQGRWWKLCILINGRQTSMNGDTGAQATIISLQTWRELGEPELTPSDIDAKNCNDQPFALLGKFQCTVQFADKPPQILIAYVSGEVGHNLLGLPWIEALEIIPRQILFPSSKSADQATMIENFSAVKPPNKSINNVSTLKAVLQKDFPEVFEEGLGHCSKAKAHLILRSDAKRVFCRARPIPHGAMEAVNAELDRLLQIGAIKPIDFSHWAAPILAVKKKNGKTRVC

SEQ ID NO: 163431 - protein, 244 aa, Heterodera glycines
  unsure (1)..(244): unsure at all Xaa locations
MSARIQHEAFFEHFGIVLDNAEGVYFSGQEIAGKVVIECREPRRISELLLEVKGRARTHWTKSRKMCSENETYFCEQFNTEYTRKLPKTEAENDAGGETPREGGRTVAERRRESIKMMGRLLHVGTHEIPFSYALPKSLPSSFEGEFGFVRYTCRAICESPWDFDTVCFLPFTVIGIEDLNXRGRGSVSAEFRLAKGGLTPGENVPMNAKVRNQSGRTLRGLELRLSKDVVYKWAIHSFLCPKS

SEQ ID NO: 163432 - protein, 241 aa, Heterodera glycines
EAHLQTLNRNTVVRHCLSMDLSRLLVFLSLVDAKINEHLMSRFNLVLSHRHNLQSSSYSARLMNCFSSAVSRIQHARAHIYHSISDIGVHVDDNGFNRLFPQLLHYERATEPPQADITLTFIRPGATPSHSQIPSVVSQPPSRDSPPHSDSTPNPPSHSQQNNPTALNSLLSGFMSFAHQLLGGVPDQNHPRHPTISPRMSSRSVSFAPRSSASSRSTNSTGLTGQFPRPFRHVQGSQRRF

SEQ ID NO: 163433 - protein, 125 aa, Heterodera glycines
FFQNCSFQILKMVLLTEKIAKILNCRVSELRDRLNHPSDCETVVKALTGHRVKTTYKDRNGYTKSFAFGGITAQGAAITMAYGRLGRPFNVNVAAHFYVRHRIKLRHPFLHCAVESFPEGQEDRF

SEQ ID NO: 163434 - protein, 338 aa, Heterodera glycines
  unsure (1)..(338): unsure at all Xaa locations
MTSQPIRVLVTGAAGQIGYSLVLQIAKGDVFGKDQPIVLVLLDIPPLTEVLTGVHYELVDCALPNLFGVEAVTTEEAAFKDIDYAFLVGAMPRKEGMERKDLLAANVRIFKSQGEALAKFSKPTVKVLVVGNPANTNALICAKYAASKIPAKNFSAMTRLDHNRAMAQVAQKCADGTTVGMVKNVIIWGNHSSTQFPDIRHAKIAKGGSETLAYDAVKDTAWIQDQFIKTVQKRGAVIIEKRKLSSAMSASKAACDXHMRDWFFGTPSDGRWVSMAVPSDGSYGIPEGLVFSFPVTIDAQKEWKIVQGLDLDDFAKQKIDITKKELLAERDEALAACK

SEQ ID NO: 163435 - protein, 317 aa, Heterodera glycines
MRDRASDSYEDAKQGAQDRYERAVSSLPPSYSLPMNSLSPFSSSVPHLPMPFSSSSSPSSASSSSSSSSAAPSDSLLLDYLFSGYDKRIRPFSDGHVPVLVELTIVLAILTELRENQQAASFVISHVQKWTDPRLSWDPAAFSGLRQIVLPRADVWLPKLFIYNSMDTKEMLADNYFDVRLTHQGKLKINIPHYVTCICRLDIALFPFDTQFCAIAQASPLLGVEEMDVNVTMPPKDSYFSGNAEWELFNVSVRDTKFWEDGERRVEVHYVMHMRRRPVYYLTVIVAPTFLISFLSILGIFAPGTNEGPRSEKVSLG

SEQ ID NO: 163436 - protein, 224 aa, Heterodera glycines
  unsure (1)..(224): unsure at all Xaa locations
SHVTLTFRFCLVTIGRFLLSTLALTNQPIHDLYTIAVGLYACWICVRLGLLSREWARRGWTYVKKVGTGLLPFECPVGSFSAVQCHGVSAGSCLCRRFSFVGRSFPLCLSLYFQMLVISPLRVAIFQSPLFFPWKEWAMGVXHFKIVCASGLMGPDCGLKTAFEQVQTTTCDGLSLFVFKMYADVIWDIRLRDLYTNLVFPIENTLTFMIAFPYVLSNFLLFFV

SEQ ID NO: 163437 - protein, 326 aa, Heterodera glycines
VQLVHSEFPPPSVALSHQFDHWDALRGRKGIDKFEHFSAASSTKSNRFLVCTAFGAFLATNFENCAVLERICDSRLGKNPKEVKRFELPFRIGKISAGRDHLIILDSLNGEIWSFGTGTRGELGTGRVEADNWAEGPRRIPSFSEADIRCVDIESGAWHSLALTAEGDVYGWGWNGHGQIGHPSTEFSIQPTPFPFDLGDGRATMIRCAGNNSFLLLSDGSEMEFGEICTEKPMDEQMAEKMPENGSKNGTEKDEKKGQSQEKDGKEKRQSPSAKRQRHQRTLKVAVVGCSHGQLEAIYERMVQMESQQNAKFDLLICCGDFQSLK

SEQ ID NO: 163438 - protein, 126 aa, Heterodera glycines
SAPPPPFLWSNCAFPFDQFPHFFDLSANISFGQCHSPFYCLIKIARNPSNYLHPFPNLFLISPTLRGSQMAPFSQSVPSLFLIKCAHSLLISAISPFFSSSNCPNLFWSIVFWLFLLISVTPLHLY

SEQ ID NO: 163439 - protein, 207 aa, Heterodera glycines
FHRRHPPQFPSHSIDGTQMARTALSGSATRQRSITDNSNSNWFAGDAAILRTEQQCSARQRMNASAMAKISLQKQCSPPECCYTQCSTDAPQKCHDDNDAQKAFDAVHLRSLNCFFSSFCPPFRHFLPPKVLLRLCLLFLFAVGGCPIVPGGVSATARSRRTLVPLGMDKQMFPPQIFDENAPICTAEREPCGFYSFSLDGKAPLKW

SEQ ID NO: 163440 - protein, 117 aa, Heterodera glycines
MVWLFCWCILCSLPVFDNFRLAPPVPDIYGCCCCCLNGEIPRRCGRFAAVAAPSATENGAFCWLDKANPLELFDVAEFSDEARKTVLPRNLLFWSFSLSLFDEYTAVEEGKSPKLIK

SEQ ID NO: 163441 - protein, 57 aa, Heterodera glycines
QKLIVFGNFPSQVHFFVEDWFISGMLGFITAALSISVDVGYEYLNHCMPFAPSLCSL

SEQ ID NO: 163442 - protein, 170 aa, Heterodera glycines
  unsure (1)..(170): unsure at all Xaa locations
YSLKFALFSVHIPRTRGSAEANTDEAVVGRYDTRKRPKWRRRTDSEDASPLFVCSAVRQRILWCPMLAIVRQIHTRRDAHSAENSHKKMSNRRNRFDCCAAFGVVWRAKTCAALCRGSNATALSXXMAVTLQHFFSVPSSRMFRIQIICSGRMHRQITKVEKNCLXKLFL

SEQ ID NO: 163443 - protein, 222 aa, Heterodera glycines
MRCFFPRVVRSVFPSPLSFVRSSLSTFYPIDDQLFGLDEEQRQLRQLVFRLAQKELAPFADEIDRQNEFTKLRDFWRLLGQQGLLGVTVPAEYGGSDRTYLDHCIVMEELSRASGSIALSYGAHSNLCVNQIRRHGTPVQKAKYLPKLCSGEAIGALAMSETNAGSDVVSMKLSARKTGDRRSFVLNGSKFWITNGPDADILVVYAKTSPAKHQHGITAFIV

SEQ ID NO: 163444 - protein, 145 aa, Heterodera glycines
GINITFVAMLPSNLFFLLMTMLSSSLLHQTLANKFSAETDAVNPTRLIQRRHLIRSRATHKEKMHSNVNEGYLQWEKDKFHEALGEKILPKSSRSLMDPKFLGSVEPRLLKTSADGTRTKSDSEEEKWRNWLRRHFPAARTISDQ

SEQ ID NO: 163445 - protein, 45 aa, Heterodera glycines
VCVLSKKKNREDTTKQIQKMVINFVFLSSVGVIKCPDALCQASRK

SEQ ID NO: 163446 - protein, 195 aa, Heterodera glycines
MTTSDEKQLQVVVAANEKKQIKKSEVDFPVVLKRGVQGRVKWYSPEDAYGFIHRYDVDEDIFVHGSSIVRFNIRNKNQHPVLSIQQEVEFDVIKVRKGLEARCVSGPGGRLVGRFFNIPRRSVSGAKNQKHAVNGGLRSIRRRSDGEAIRRRRRDAWTPTKRQRLRRTLKTQRQTWPICALVRTKMTVAPWRTRR

SEQ ID NO: 163447 - protein, 225 aa, Heterodera glycines
SLSKMRLASLFSVLLFLLFIHRTIPSPSPKFDEAIKDNGIFAFDSSEDSAEEVPPSPAFADSLRSPHSSEAEEDGPSAEEEEQFVDNVAGWRPRPSFLPPFAVQNRCLKAKFFDSKSDECRPCSICGPDLYEREKCRTDSDTVCEWCLTNLRVIVRNSDFRVKCEQLIALRDQFRAALVQHSVVEGKAKPTIYSVSMFENASKLWKIELFVEMAFYITLIALVLA

SEQ ID NO: 163448 - protein, 92 aa, Heterodera glycines
ADGSIMSFKEARDAGILQLQFDGLETRLNEASALGEINPGLAEILVAPCGLSDNGLPLSLVRAFLKYQSVKGRVDDVNGEVIDPATGLGKSI

SEQ ID NO: 163449 - protein, 182 aa, Heterodera glycines
NPSVNKIHFSKDELDKILRDADEQRDFPALLRSLGQLAFRPTDGFSLPSSALSQMASHFASLSPFSAFHWANGLFALLPSAENHANSEVLIVSLLRSLVDNVPLLNANKLRAFVKTEISRQCVSFWQIGKAHLASALTLCVLRILLMELSYLEAIQNGVCRADLIAEAQNIWSQMLSADELL

SEQ ID NO: 163450 - protein, 257 aa, Heterodera glycines
LIHPEKMRLVTALLKFIEQRKSIQSDEHFDSAEREKQFDELRVEMGEAKITVEDLSLTFAVNAPARCFPYECVELIPNGASVEVNGSNVELYVKRLVDFHLNEGIREQLFMFRFGFDLVFPLSSLTCYSTSELQTLISGEQSPRWTREDLLRYSEPKLGYTRDSVGFLNFVEVLMGFNSAERKAFLQFTTGCSSLPPGGLANLHPRLTVVRKVGSGDGSYPSVNTCVHYLKLPEYSSAGILRDRLLAATAEKGFHLN

SEQ ID NO: 163451 - protein, 195 aa, Heterodera glycines
LDSLLKRAPRHRRSKKHRRSRGHHHAEHQHQRGDVFGGEADQNGQFASSGPHAKSFLTRLDSAHSPGSPNSRNSFMQMMVLDRSRQPSADVIETVCLQNGVCTCAETTCTLRCSSCARLTFREICLNIYSPHGQMQKFALTFRLNPNSVPQTVKISQSSAEYTVLENVRVVEWQSSSLDRPELLTVGSESAISPV

SEQ ID NO: 163452 - protein, 275 aa, Heterodera glycines
  unsure (1)..(275): unsure at all Xaa locations
MNVNDLVNQFKSAALSVGEYLTPVLRESKFRETGVLTPEEFIAAGDHFVHLCPTWLWSKASDSSRARDYLPIDKQFLISKKVPCHHRCSEMNYNDSLEKIIKEEGDEWVDTHHFDTQTNLAPKELDDLDTINTEENEKATTGESEESGEEGEAFDLDEYIGRGGLEDEDPNRYIANTVAKVPKEAAQNESDDIGILRTRTYDLHITYDKYYQVPRSWLIGYDENGTPLTVAQMKEDFSPDHXDRTITLESHPHVGDLCLATIHPCHHASVMKHLI

SEQ ID NO: 163453 - protein, 181 aa, Heterodera glycines
MQQKCTFSLITQDKTEVVVPSDFVDQSDMLSDYAKMQRQNNGDAEELQAKFEMTNEMPLISKFHLEMIFEFLGTYREEKQKENEGAADEKQTTKSGERAAEATAEESAELSTMPKWAFDLFDKLPKNDLFLAMNAANYFGIAPFVSLSAAFVCFQILQKKGKREVAEYLNMDENDNNNNGK

SEQ ID NO: 163454 - protein, 202 aa, Heterodera glycines
NTNMKPAIITALLIAFILHQITAVIENECGQCKHCLDKNDCFLNMITAWAQNGEIEWPRVLGENPNLWGKEQKVLADAKATEDKQFQDPKFEQNFKAMNAIGMAHRGAYHYFRGEPGSAGALEQVRHFLNTSIRAGFNVHKDFAVVNVEIYKNEGADKDQFTGKLLNFVKLLKSKVPNLFIHTSVDHWSALINNDHDEFFAL

SEQ ID NO: 163455 - protein, 281 aa, Heterodera glycines
MSSVPQLSASEHKERGNRYYQAGKYEEALSHYTRAIIKNPNDPTYFTNRALCNLNLKKWDSAADDCRKALDMDRKNVKANYYLGKVYVHQGQFDEAIKVLSRAHEGVLNLKQTYGDEITQLLRLARREKFRQEEDKRITQEIELQSYLNQLIDDDIAKKVNQLEDKKENDVEEKAEELKTQGDTFKKQLNNLFAQVDDRRRKRDLPDYLCGKISFELLKDPVITPSGITYDRQDILTHLHRVGHFDPVTRVPLTADQLIPNFSMKEVVDHFVQENEWAIDF

SEQ ID NO: 163456 - protein, 238 aa, Heterodera glycines
MCRFQCDQQCCPSKQTYTAKDKLKTEEQQFSRNKNVKFFSPDSSDESEDDEHHNHHHDNHHLLRTKTNLSNYNFLQSCEDNFFRSFDATKIADNFCHDSDSSLSLSSAATEEEDSEEYNSQQSDSEEDSSKTTSSSIDGSTTTFKLKSILSTSAKRSPTAEKHAYERRVSFADRWGMQLTSFRTIPNRFADRFYDELELDFNEVNFSDNTSYFWCQSLQQQRNNLQNWSLDEQGEVAC

SEQ ID NO: 163457 - protein, 134 aa, Heterodera glycines
MSPVIAPFVLAIIGIIALPTIEGAVGRQQVKLGEQYKYENVPGKLMVKRQTAASKEPQYLFAGQTAWTTDGKDRFGHAELDFATGTMTIPNFSENDLGSYTFPLEQPNFSAVNGPNGCELQGVGGTMLDLIKKE

SEQ ID NO: 163458 - protein, 86 aa, Heterodera glycines
FYYAAHSLLSPVKCQSCLLSIESVKPFKGDRSLVAIVHSIRTGGSRLVYLRITRRVSLYLDNREEPVLGGRFCETYFDAEQPGLSQ

SEQ ID NO: 163459 - protein, 185 aa, Heterodera glycines
MISMINKLLDWIRSLFWKEEMELTLVGLQSSGKTTFVNVIASGQFTEDMIPTVGFNMRKITKGNVTIKLWDIGGQPRFRSMWERYCRGVNAIVFMVDAADKSKLEPAKSELMQLLSKPQLEAIPVLVLGNKKDLPDALDEGQLIDAMNLESIQNREICCYSISCKEKSNIDITLQWLIQHSKTAR

SEQ ID NO: 163460 - protein, 195 aa, Heterodera glycines
MFCQWRIKVKSNNFLNSFSFYCQKQCLFSSQEKCNNKNKYLPDEDGIVRSEFQSVPIQSEPFTETLLNRIRQFSAEQPKRAIFVDAENPSNITTFGQFLSKTHSAAHFLNSIGFSSGDVACVILPNCWHFFAIFLAASMQKACISPVSTLLNEVELARIFNETKCKGVFCADSLLERILATRPLCPHLKYVVLIS

SEQ ID NO: 163461 - protein, 53 aa, Heterodera glycines
LIFHNLFLPLFASLLRLIDHRHHTYTLSDHILLYEFLRLFTIKQNMQFFGPPI

SEQ ID NO: 163462 - protein, 199 aa, Heterodera glycines
TVVDVAEETVAQSMDQLEEGIEVGTVVNEEMAQNVPEEPMASVQLAKRSKPFNQRIVENIGWRKEFGRVPPKERDSLGLIECIDGATVGCNQRLLASLKSSNPSLFLRTDKFRSRNACGNKKSEVSLQIDEFDEFYKRWISNYEQEGAGKSHGEENSEHDGKEESESGDEEEEPPQNSRGPVIKCPRMPKIRINLKRRI

SEQ ID NO: 163463 - protein, 235 aa, Heterodera glycines
  unsure (1)..(235): unsure at all Xaa locations
MKKQPSALLPQRQQFRQLNPPLTHTMTSLANLHNATDDDHFGRLLESSVQSNVVVLNFHADWAPQCKQMNEVFGELAKLHPAVDFISIEAEELVDTSELFDIAAVPSFVVLKAGKPVDRVNGANAIELTNIVEKHAKAAKSRSAGANADFSDTASTAAGGAGADASMAAAPLAPAALEARLKQLINMAPMVLFMKGTPQQPRXCGFSRQTIELVSKYNARYSTFNILGDDQVRQG

SEQ ID NO: 163464 - protein, 139 aa, Heterodera glycines
MALCVAIYDKHDALLYLRLKDRMSASPLEVQRFLHSSSDIVADKMNSPGNKATQQENFLGALLLSDRFRSLAYLTNTGTKFLLVIDAEEGTLKDHEIQLFFKNIHTKYCSAISNPFYSFGSTLQSSKIDAVVNELLTSF

SEQ ID NO: 163465 - protein, 139 aa, Heterodera glycines
MENADEKPPPVTSSGGTNAAAATAALAMQKIVQQHAATIANQVQQQQQQQTVSSSAVVAPSVGIASLPQYHVSAPHQNMPGSKYQQLLLFIDELGRVIRPTYNANRNAQERLKRDIVQARLLVRECMAELEQQRKQQQT

SEQ ID NO: 163466 - protein, 294 aa, Heterodera glycines
KVSHIFNRKRNIIELELRQTVPLQKGCQNYTGPLTIVDQELEGHFAHTIQIDAAVSRHDIQCHSKGRKLKKKRIMLGTGEEVDVDLNSMDFDSPVLWIRVDPNLLLYRQMSINQPFYQWELMLLHERDVLAQQQAIETLCRFSEHKTKILLEETVRNDKFFYRIRREAAHCLVQIYNSLPESRLGESPPLIDYFRQNFGSKTSPDIPLPNNYAATSSNLQNNLLGQALPAAIGLIRGQDGRECPEYVLEFIINLIRLNDNSTNRYSDDYYRGALIHALGKTLTMSERTVEQPDC

SEQ ID NO: 163467 - protein, 201 aa, Heterodera glycines
MTAARLLKMVPSESALLVCDMQEKFREHIKFFPQILQVTCRLIEAAKLLDMKILATEQNPNGLGHTVPEIVLKKHDIPVFEKTKFSMCVPDLQRELGLSPAVRSLLLCGIEAHVCVYQSAIDFQQQGFNVHVVVDASSSRSMVDRIYAYKQLEKVGINLITSECAILGLVGDSAHPKFREVQKLIRESAPDTGLISNTSHV

SEQ ID NO: 163468 - protein, 253 aa, Heterodera glycines
MYRRVFCYSSAPLAGALGAYAGVTMANQNSPSTEKNTSEVQQKVAKQAVVKSGTHNSQPKDVQSLGTGEITRWDYNWDKRDPFSMVIGKEYEAADEEKKKEILAKFVPTATRNIFLIRHGQYELDSKTKELTALGREQADLLGKRLAEFEVGKGKKINKCFVSTMKRAEETADIALKHLPHAAQIQKHSDLLREGAPCEPEPPLSSWRPQYYFHEDGARIEAAFRKYIHRASPSQKEDSFELFFCHANVIRYF

SEQ ID NO: 163469 - protein, 139 aa, Heterodera glycines
MICPNFVLLSLLSVSLFSSLSLADNQTITVHGQTICHRRSVKGLHVELREHDTFDPDDSLGSTTTGLDGSFKVRGLENEIGSIRPYLRITHKCDVKDELKCRRVTEIDIPKEKVNNDVYEMHFVNLNVHGHRDTENCDE

SEQ ID NO: 163470 - protein, 209 aa, Heterodera glycines
ISNGFAAVPIPWVNDVDNFELAKFDYSPLPKFAENLPNRVFCNCKGTGGCSAQKGCACVEMSTIELSEPGRVHNAHLLSENAFESRFFECSSLCSCAGTCANRLAPQNDAQRNHLQIFKTLKAGFGCRALKPIRKGSFICFLGGEIFPFDYPSKKAEEFKQIVDADKVCFAFSDKVRQFAFFVRFDRFANESRFFNSACCPNNRLVHLF

SEQ ID NO: 163471 - protein, 179 aa, Heterodera glycines
HFQQTNKKMGSSASESPPPPKLVAIQDLPIYKAESVPAVRAARPVDTIGRPATFGEEVFGNFRLVALQLRDFVSEKLGVVNSSLAPIRDAANATEQFILDEQRKVLPRAVAISMGGMAGFVAAMRKGGRMRRTFYPLIGLLTMTAFCYPNETVHSVRVGIAHSQSAWHNFKQAPEPKSS

SEQ ID NO: 163472 - protein, 174 aa, Heterodera glycines
MPPTSWPNAFVSTANERNERRIVPTQSSSTSSRNRGRHRRVASSPAAPIISSGASPSSSAPLFGHRRPPPSPWPSSPSSSPRFPPFSRVSAHNRLLPLPLLLLLILPMAFSSLLIHSANALHHRHEHPQKCSIEGEICTTINAHVCRNGTCVSACTLRGMKECHCDVEEDNFCF

SEQ ID NO: 163473 - protein, 126 aa, Heterodera glycines
MSWPDLVNNNLIGTGHVSKAAICGLDGSIWGKSDNFNLDATEVTAAMNGLKQPDAVLASGLRFEGEKFFVLQADTDRIIGKKMATGFFIYKTGKAFIISIYEGGVQPEMCSKTTGALADYFRSINY

SEQ ID NO: 163474 - protein, 162 aa, Heterodera glycines
FAMSAAATQRLQAKRQTLDEAYAPPANFLEIEVVNPITHGVGKNRYTDYEVRLRTNLPVFKHKESSVRRRYSDFEWLRNELERDSKIIVPPLPGKAFKRQLPFRSDDGIFEEGFIEERRKGLEQFLNKVAGHPLAQNEKSLHIFLQMNELDKNYVPGRIRTA

SEQ ID NO: 163475 - protein, 65 aa, Heterodera glycines; identical to SEQ ID NO: 127533

SEQ ID NO: 163476 - protein, 270 aa, Heterodera glycines
SINCPPFTGAIYQKFGQTTEEELFSNDSSNCAALDEFLSIIGHRVQLRHFDGYRGGLDTVHGQSGTEVRWGRVGRAYGTVCIGDAQQLQRKRHIGNDIVAIVFQEQNTPFCPDMIASNFLHAYLVVHPIEPGTDRTRYRVSMTARDDVPFFGPTLPRSSIIWKCQLRDFLLTKLINAENAAYKAEKFAKLAERTRASLLDGLYSNLKERAQFYGMAFLDSVDSATKQQQQEKHHHQWQNNGQNHHQHSQQQQLMNGSVNGGTNPMGLFHS

SEQ ID NO: 163477 - protein, 206 aa, Heterodera glycines
EHTFLQGAGQPDCSHTSDEYCQLPYYTAIHELFPPERSRWVPLPTQPPIASPLSVRLVQRQHLPGNQLNLTIAIQGGTDKLSLHITPLNGFQLRHWSLTPFDPATFGIRKTYFVFMTYGFESPGERLVWILLENNERSVSATDEVPSLELAVATKYVHGKNQNSDTLLQLRSLIANRRRTPHAGVGFWRWAITMIAGVSEIVIHFF

SEQ ID NO: 163478 - protein, 319 aa, Heterodera glycines
MAVPSISPLGRPHPPPPPRSPSRPSSKHSFAGDHGSLLQTSPINRIVDEEGQEWEVEEVQLDVSKTGLGFSISGGCDREPDLMYNDRYIRVTDISKGGAVETDRRIRIGDVILFVNDWETANREHDFAVQALKNAGTFVRLLVKRLKYPPLQKSLSQSHLSEPIASGTFQRSLSGGAADSRTLPLQPPVRSQSLHHLPMNAVATSPNVVTAMGTLPRRANVQQQFATPLNDPGRQPRWVVIRKGEMGFGFNIVGGEDGEPVYITRVAPGGAADQTGNIRMGDVLLRVNDVDLSMATHGEAAVALKAIPQGAQVKLLLQF

SEQ ID NO: 163479 - protein, 271 aa, Heterodera glycines
MIFRLGNFRHFPVNFCKLCIARFTVAFSRRIFRDHFSLFLRSKRSLLFGASLVGVSFGSNVTLEDEYKRIKTECKECDPFSPPPTDEGWTLFWCNKSLAVYRRRFVANGGNCVFEYRCIGTYEDISPNDFVTVQEDISCRLKWDKNVNSLDELDFDYNTGTQVIRWESKYPFPLWPRLYIFARRQFVDRPRKQIYILSRALSSDNFPDPSQTTVRVECYESILIVRAHDSLDKKGLDFVLSYYDDTRSSIPQKIYQYGINVIGPSFIEDVH

SEQ ID NO: 163480 - protein, 223 aa, Heterodera glycines
MIVINGAAQCSFSASNLPSISESKNLKAVAKNGAKQTISSFTELFDELAECQWYWGGISAGTASRLLQRRSPGTFLVRDSRSDRSIFSFSYATASGVYHSRIYRFNGYFCLGGPNALIRSPSLRDFVLQTVARSSVDSGETNCKKTGLSATTASRNAELPLRILMHPSSAEPTAQPVDIRVPLCRNNFVPTLRGACRLAIRRSISDCSRIEELPIPKKLKKFL

SEQ ID NO: 163481 - protein, 174 aa, Heterodera glycines
MLLSPPLLFVLSLCSLCVFGHKTPNASDGPAMPELPKALQKLSDAERNCLFTIYTMSKLFENKKVQKTLAKQLKSCDSKDTSEPDIWKSREKSNGWCEVNLERIDSEYGPVIMHAHGSIASINGARLFVKSTSGGIWIAIYQPECLKEKDESKKSEEGVVSNTLDRVRRWVLLK

SEQ ID NO: 163482 - protein, 207 aa, Heterodera glycines
MASQPIKAVLFDLGGVVVEYSDRNAYLNRLKIIQSNAKFVDLFEQFECGLLTIYEIEPEFLKTVMGNKSGDDLIKAANPTNLMKTKNPFVENAIRSLRSSGKYLVGLLTNNGFWVRDRSESKLTIDTSDFDFVIESCKIGARKPNADFYEMALLKMGLSAAECVFIDDLEENCKGAEAVGIRSIWLKDDDYKTAIEQLEEIIGEKLL

SEQ ID NO: 163483 - protein, 349 aa, Heterodera glycines
  unsure (1)..(349): unsure at all Xaa locations
QLAVHLLVQYSTMLDITARAFQRPFAIAFLMPSQPTAKNVEAFQQAAAELLMPIIACNKRYVHSILRQXDANXXSERDQQNVQSYYSTSGNAQQIVIVSNKLKSVVQKTNAWFERVSDQLCESDGSADECFCECAGPEEFRQFVVLLAQKHSSCALLNLMELAPCKDVKLKHSIQEAYLRLTDTEVAKGLLFCGQTAVVRSTFGANSELPRHETEDPNRTEEECIPLVVARESTLKTLSYRLLRCVYPLLTGERIVILASKQRVSTGVDLLNKLNSMRICRRPEGVKWNFDSDIDTESNTMSDNNTHCQLFGISREANATSQWINGEKCEHCTVVDLGNQKMRAHEYSG

SEQ ID NO: 163484 - protein, 120 aa, Heterodera glycines
SIGISINFDDTEEHFECLLSSKLSHLPSLSLSFRPFFFFYWHRVDERLRVVAVRVRVAAICRSVAAVVSHFAAGIFHCFLLLVPSMTWHSTGGQKGDECQQNNEKNKWGRRIAAHLCQWK

SEQ ID NO: 163485 - protein, 203 aa, Heterodera glycines
KNKLFRFFLNFLFQKEKTIIPMKDENAHFTPQQISKLLNLHIKSHKCLDVKCQTERQQLLSTIEKLARNFYDIYKMFEKQKREMSRISNLYKDFCIQFGLPVKIDLVKQQEISQIDKVANMIYQHFIKIREVNKKSKVHPNFDENLQSSGLTSINGQCKKDFSGLSNRKKSGSSSSSIVAIDNENSAQKNGCETSLRETDNGK

SEQ ID NO: 163486 - protein, 178 aa, Heterodera glycines
MDEEKLKNEVANCIRSFPDFPTKDVVFRDIFPLFSNPSLIRSICAHIVTLYRQKIDVVVALEARGFLFGPIVALEMDVPFVPVRKRGKLPGSVFSATYVKEYGQDVFEIQKNALSEGQRVLLLDDLLATGGSLNAASQLISQSNAKTQAVFVIIELEGLNGRRKMDFDAEITSLVKYA

SEQ ID NO: 163487 - protein, 143 aa, Heterodera glycines
SKMRSICFCHFSAFPFSRQFFGGCHRSFSSPMTPLFLSFSLLLIYSQFASPTNAFILQELPLYRNVRNQRHATPPIGPSKPSIDYGIRRSTVSMPLVIRIEDGMPTIFVRPSRAFNFHRLNRLQEFWHRNEALRRLTQTGNRP

SEQ ID NO: 163488 - protein, 172 aa, Heterodera glycines
SHQNQSSVPLQRAVASVYNANSISTSSSSTKHAVDLINEYLTMLSVCLSHDELNKFAILMRRWRAREMPILEFAQKLLELYGPERRHLLARMRTLLRGDPSDLEALTDFLRANGVVENAAAMAASPLLTAEISLGEGTDSAKSTASSLPSAPLHFSSSHGFPSADFHRPNSS

SEQ ID NO: 163489 - protein, 205 aa, Heterodera glycines
MNIVCPSHPEADLVEDARAGDLICTRCGLVVGERLIDVGTEWRSFSNESSGKDPSRVGAPENPLLSGSDLSTSIAVSFGSDSDRALANAQRKLLSSTDRQMTQAMMVIREMSEKINLTRTIQDRAAKLYKEVLESKALRGKNNEAQAAACLYIACRQEGVPRTFKEICAVSKVSKKEIGRCFKLIQKTMETNLDHITSADFLSRF

SEQ ID NO: 163490 - protein, 417 aa, Heterodera glycines
MDDLCRRGLLTTEQTPHEPSSADKFDGADEAVLALVDKYRRTCGLPTAKRSAPSPLNSLLSPGKLPPAGKPPTPYIPTPGGSAGYAPAALLKQQQRNASFGYHSNSSSSNQDDWQALLQPPPPPPPPMPSLSSVQTALSGGTPRGILSHASSAAAAAHKRDTLRSPGTEARRPKNQTLFKNALEQIRKINEESKSGSGTVPSATSVSDPFPSSSIPPLKTPSPLRPLISTISATSTEQQHLPAPPVPPNLPRDPRLLKHGNATAAAVVVVVDKPNQQQQVRCATIPVDARPNSVLSPPCDPRLKRISAEAVPVSSPSVLPPLPKFKATVPVLNVRPVSSAAAVVVPPPPPSPPPNVSVFKQLVPSAASVSTTAPAPPNLGFKRAYGLVGMVSSGIDIPPPPPPPELAPPEEKKMMLQ

SEQ ID NO: 163491 - protein, 244 aa, Heterodera glycines
MARQQQSTASSSCSSSSMCCCNALAKMHESFVAKFRVIRPQANLITLDGDNNNDIILHEEADEDEAIAQPCTSSAGQQPRPIGGGTADELQQEAEDNESVLLNGAESPTPGAGTLGYEILAEDSKTPAPFYEMMSESELNAELAKYGHGPMGKRAAIRLLNRIYEATHPVISSDTPIPRKVRRALATDDGCGDKNGAAERQRERRTKQKIGQMLRLANKNAETETTGNYAKQNDDGGGDGFANN

SEQ ID NO: 163492 - protein, 61 aa, Heterodera glycines
FFFFFFFFFQRKRVLINKKNINVKCNVKADCEVEKDNPISRHYSNKNRRGNFSPPLNFSMR

SEQ ID NO: 163493 - protein, 237 aa, Heterodera glycines
MEKSANNFSKILWTQNEHRFQQICALPFIREQKDGTLAEERYRHYIIQDTLFLEGLSSAIAVAASKATDHPKGHERAMLLLSHGIAILDTELDLHDGILRKLGLVSRSEVHMNYDQSPVCHHYVSFLAATASQQSLPVIVASMLPCYWLYREVPKWMLAERQKAGGTNTVTQYHEWIDMYCSEEYAEAVDEMLAHADELSQEADQRTLAKMATVFERSFQLEWMFWKSAYQMCQWGI

SEQ ID NO: 163494 - protein, 230 aa, Heterodera glycines
MISSTAVPRPLRSSNQQKQQPNALTKQNGAHQQKTPIKAREDSRNRNDALGAQKPNGHSPRTPSVPPVNKRYAHVKSKVGSITEYTPSPSRVKIFHESVRVSATPKVGSLQNASHVPAGGNVTIENRKLNFREAAKPRVEDKSEVPIPKSEKKIATQKLEWKAQPKVGSLDNVKHKPAGGNLKIFHESVRVKCESKVGSLDNIGHVPGGGNVKISDYARSVSRSGDGCRR

SEQ ID NO: 163495 - protein, 258 aa, Heterodera glycines
MVDVPADFAVLLNSAPPISRIESNKMHWLRKRQQTNATALQRGIDQIGQLATESRGLKRPVTSFARFADSPDEQALYLLWEPLTSDQPTANGGPSSRIYGYLKVVRDRRLYLVDGEGRQFVTTPLCVLDFFIHQSVQHQGKGAQLFRAMLKAEGDLGAHRCAFDKPSDVFLHFLARHFGLERPLWQPNSFVVFPSFFEGIKPEKVSSAGDDRLRSMTALERHRRSVNEQYNGQPPMSSRLSPLPAAQRDQAGALIHQQ

SEQ ID NO: 163496 - protein, 88 aa, Heterodera glycines
SLSIMTVIRDFLCRSSYQSLAHLCRNQIRVYSVEREGAGTASGIEHALKFNKAGAVHKKELKDYKCVEYLHQNNYSFYDKEVGKLQKI

SEQ ID NO: 163497 - protein, 209 aa, Heterodera glycines
MASSAAGFAIVTGANTGLGLHFVKSLYASGTYSAIVLACRSEQRAKSAIEQICCGQSSPAENGNGTQTKLEFAKLDLTCNDSVRTFVSQLDERPYQKGSLRLLVNNAGIMGHPFQLVDGVEVHFASNHLGHFLLTNLLIKHNWLASDARILLVTSGLYEKCHSMLTAAELTNNAVAKKRSPAEYYAFSKLANCLHAVGLANRLASPAVA

SEQ ID NO: 163498 - protein, 207 aa, Heterodera glycines
LLTPSVASSSGCSSFTINSFTQNLASVLSDTKRSKAEVAAFFTRHWGEQFVPQKTLCSAPTIPKISLEHFRHYLDNTAKKHRQYLRVRKTLQRSNGHLIGEQIAPDEIPSIFFSSAFSYRDSATFEAVFLEPRQGEADKIISGAEQRRGAVGIGSLYRPASCGSLSSMQSVQMSIAPAAEACHGRMFRGCHRLQMRLEHFDDTVGML

SEQ ID NO: 163499 - protein, 244 aa, Heterodera glycines
DTRKNSLSLLTPSTSSSSADFELKPFLSQSFVLCQSFQKGFSKSLFNSFKSPNFHRLTTSHFPLLNHPKMSRMEKICEDVNRNAALLNIFGNSDSVLLSCSDLCSENGCGAMSRAQMICEDVNYEAMANSDGGGGTDDEAYALMEFGGSLFCVPASIFATAVRVPLQSSVWPNQPANFTVGNPSSQPQQGDVSVGPRLPAVRHGVGGLRQWETVAEDVEGCCSTTFADGPKCLFKFVASTPDAS

SEQ ID NO: 163500 - protein, 189 aa, Heterodera glycines
KAFKFFFTAFLVSLLSVALHFYFDNKTIFPAKFGERWLLLIAHPDDETMFFGPTLLFLSSIGVQLHLLCITSGNSEGLGTIRRNELYSSASVYGIQPKYISFVDPEERRFPDGFRDWNITSLSALIYSYIRRLKPDGLITFDEWGISGHPNHRDSFKAILNLNTEGKLKELGLKKALALKSSAVLRKYV

SEQ ID NO: 163501 - protein, 323 aa, Heterodera glycines
MPSTNANDGITSADDATRLRMVDPVDRYSALIVRGLIVGTGALGLGLFIRNSKLFAAFNHVKQIPQDYYQKGIIMKGIVRDLESNGIIKVEHRPAIRIPRLFGTKKSKVGGNLNLRLAGIELSPVGIEYLQKEMQLKGRFVKFSVIKLAQTEPDIVEADVTAKKAIRHVNLNTELIRKGFARTPTLDNHWHRESLQFNTNYSRLITRLLTCEKVAERRGLGLWERATWVERVQSYPSTAVQIFKHSVPAKLAVFSFELLRDLSMVLYSIAQNIYFICVELFKYCAFGYRKLSIGISKAFLIYTNAKRHLIQIGSKIGARQSPA

SEQ ID NO: 163502 - protein, 285 aa, Heterodera glycines
MTTTNSASNNYTGEVSKIEKRQQTMRNDPFGQRYLRDECAVFDYNAWDDVDWPEEKEAEILQTIQAQMADAVPESVSLSLLENPKDRWEAFFETHNNKFFMDRKWLSREFSELFVRPKDSAKINVLDVGCGMGNTTIPLLQSAEHLFMYSCDFSKKAIETLRNDQRISSERCRPFVWDITENAHQTQVADGTLDFVLCIFVLSAVRPDRLRAAVSNLVALLRPGGMLLLKDYGRHDLTQLRFKSGRLIQHNLYRRGDDTLVYFFTTEEMDELFREAGLEKIQNFM

SEQ ID NO: 163503 - protein, 129 aa, Heterodera glycines
MLSSPHNFKVAIVGAGPSGLTAARQALLYGYKVRIFEKEQNFGGVWRLAISENAQRRPVPLQSVMDCSKQLCAFSELAVAEHFPTFLRPSDAVAYLESYVRTFELARHMKLGTEVKTIRRSECWQKTDN

SEQ ID NO: 163504 - protein, 82 aa, Heterodera glycines
MSQDLFGHSKSEEWKDSDETGNDSDKLSQMYVGIRPVDKCLRIAYAKAMDMKHQKVIVMVENDNDFRTYDTKEVPVGEIIKY

SEQ ID NO: 163505 - protein, 156 aa, Heterodera glycines
MKSERKGGLVPSLSSKRQQQSVPSHSVPSTEPSPLASPSLFLASQNVGDKGHQPPQKHVYSELALRNNYQMLEQSRTCQAAVSGIASGILGLTGTLGFLFYFLCVFLQAFVWQYKTGFRWSAFFTSRSLFLTHSVVSGLFTYVLFWVFVYGLVHVY

SEQ ID NO: 163506 - protein, 302 aa, Heterodera glycines
MNSKMHRSFFHWTSLLMQGGILCAPIIVNLQRNKLNHDFKLRKMMSADLPNMPDENLLDLVEAEMLAKSNDRLYPFEKHHFGIKVKDDIESNTYGFFYCQNGVTFRFSSRLALNDVETIRRHYPNFLGLFKENLKSKWAKDLESLRIDTSTLSDDELKRVLLTPNAKRFVISREVLLADSFYHGMPALHSFVAFGTSWGLFSLLKKRMPEKLAIAIAFPLAVITFVLLDRVDQINELATYDKEAVEEDAACLSGAKEYLQSSIELGKLLYRLTDGKAPFDANGNCKRHKMKYTDRMKAIESI

SEQ ID NO: 163507 - protein, 232 aa, Heterodera glycines
MSRHFSLFSTTGRICELRLQPKCSRRLFCSISPSTSSGAHLDSGRKCQNKPLCALSAFSREQLGTSILHPEANRSTQRIVLISKICSLGSSAFGLVMVPLVTSALWEPIAERPAIAVFAGVANVFLLLFAFTPILLHFLTKRFVQNVFFNEREQMFTTVHYNFFLQKRALRFTADQLVDASELPKDRRFWLPLATCLAHSYPMLLPLDANCYSDQTAFKLLTKNIKLPTKEE

SEQ ID NO: 163508 - protein, 228 aa, Heterodera glycines
RVTGARIVHDTADLRESDIGTQADLYEINKVGDEYFAWITSEKTTAVTVVLRGPSKDIINEVERNIQDALHCVRNVLTNPRVVPGAGALEMALSHALLEKAKSIPGVRAGPYKAVAHALEIVPRTLIQNCGGSSTIRQLTALRAKHAQQPDTNWTWGINGRDAGGELVDMAQPAGVWDSLTVRLQAIKTAIETSIMILRIDDIVSGTKKRDKDENGGGGAMPGPGGFE

SEQ ID NO: 163509 - protein, 213 aa, Heterodera glycines
FKSHKIPLAIVGKGACRSVNEFDKIRQLGEGTYGVVYEGRDKKSGQTVALKQIRLNLKKEGVSVSVMREIQSLMDIEHENVVRLFDVVVGRRIDQIFLVMEYCDQDLASLLDNMNSPFTESQIKCLLLQLFRGLRHLHSRFIVHRDIKVSNLLLTEFGALKIADFGLARLCGVPPTEMTPRVVTLWYRSPELLFGSKFQSPAIDMWACGCIMG

SEQ ID NO: 163510 - protein, 237 aa, Heterodera glycines
MKMGQQFIPATSSMAFFARNVQLSGSSNLSAKFDIIDRRIASLEQSWRNAMPISSNSATAGTSAMSFDYAENRFLLCGNARGNVSVVDFESFSNSLSNAEVYPRHYVVINTNRKSHHEFMVNGCQWYPVDSSIFATSGRDKLLKIWDADQLKSVEKFAFEQPISSFHWFVPCDCNSSLIPIATSSSNVVLLDPRLGNTAQQIRCLQQRIWSVRWDRFRDYVLVTGSDSGEIALWDIR

SEQ ID NO: 163511 - protein, 187 aa, Heterodera glycines
EGLRKCFTNKLFIMKRPSSVVAFGSHLFVGFILLSLFIGTLGTEKKETKPAAAHSPADAKHPPPVAAHAAAGAGHASDPKHASPSPAGAAAAASHAHPPNGGAAHAAEPKHAAAPAIKITDEANNVYSVCVERDVLPAPENASKDKLKAIAAKCDECGAAKCKAKCGGKEVNDACRTCIMQNCPPAK

SEQ ID NO: 163512 - protein, 101 aa, Heterodera glycines
KFELFSSDLQFVLLPFSTMPKASKNKDPNMPKRAQSAYFIWMLANREKIKKPGMSVAEVAKAAGVEWGRMSAADKTLWEQKAADDKKRYEQEMTQYRARQK

SEQ ID NO: 163513 - protein, 189 aa, Heterodera glycines
MNSFIFRRLPSLRFPTASMNFRKMFSTAASSSQQFNVEKPVINKSDIMEPEDYDLTDRRKWVIENISNSIGDLTKMIFAVIYIQGKQHKVTQDDIIHVEHNIPLDVGEEIALEKVLMIGNDEFTLIGRPLLDPKFVHVRATVIEKTTTSPEVQYDFRKKNILNPVWLSHELTVLRINNIHLDKMLLGET

SEQ ID NO: 163514 - protein, 214 aa, Heterodera glycines
RIMHERVQQDFRSSKFSTRANQNGQHGNRSREVRFDNTNGRAYTRRNGSYSSEPSSGRRSSFSRHQDGARTYVPSTAVQRPISPNGCDSGGMFLMVDPFNIPNTLGAQIQVFDLQENANLGIRHIIGYCIPLRCCVGLFKHIQPCRAIKSMESQSMDEQFAHKYKFHPNLPLSVVPLHDTEFHRMMGSPVMPLRDGYQQRNRFFVRPSSPRLAQ

SEQ ID NO: 163515 - protein, 107 aa, Heterodera glycines
CRFFLKISGGFLCDVKRNLQNFQENPHKRTPSKNKLFENLAMPPATWFPLARFSLNMAQFLGPRDAETSKGSPKINLGSPILSFRSILPDTSSNAVDSWVPLKQRGQ

SEQ ID NO: 163516 - protein, 201 aa, Heterodera glycines
MAKSTEEERIANVHFDLELVNSDFIRPMRMNFRRRGRDLYWDMALGHDSVAALIFHTERKQLLFVKQFRPPVFVNVVRSLPENKNKSLAEVRWENYPIENGCTVELCAGLMDEPGKTPLEHMKKEILEECGYRVDESNIRPIRRYVTGISLSGAIQHLFYVELDESMWEPKAGGGNEHEGEFIQNVFMDIGEAEALLEKEN

SEQ ID NO: 163517 - protein, 156 aa, Heterodera glycines
MLSPTILCTSTNEKVKKEELKKALYAIFSQFGQIIDILAFKHLKMRGQSHVIFKEINSAATALRSMQGFPFYDKPMRIQFSREDSDVISKAKGTFVERPKKNIAVPKKKKKLAEGPTKKSKTSGKEGQQRSTAPPNKILFITNLPPECTEEMLRVV

SEQ ID NO: 163518 - protein, 200 aa, Heterodera glycines
DHFLMTYSYIVCEKNNTQRSDNGQCIDNRTKMGYGAGSCRIIPIGELDQLEEELDPCLSAAVRQKKEPSEGLPARLKYCLCCVVVFLLLALLAVSLLLLFGSDCPTNSHQLTTQFEQPKDALLYQEETHIRKENNQPKNGSKYHHEQFTKEASRGKTVQPQFKKDEVFNNATEQQQNEEDEQYSNTTVQQRNLNLEYNNS

SEQ ID NO: 163519 - protein, 120 aa, Heterodera glycines
MIIIQQCRIQCTNFKSVGAENLTNFMAIEQSKAWRTLHLVFTGGRIVNERIGMDGRLFVDHQYHFSTLKFLFDHTVFTSCPIVESLCAVYKIRSFFAMAAFSSTLDECHQMNCCCCCYNF

SEQ ID NO: 163520 - protein, 186 aa, Heterodera glycines
MSAIHQFLEWSALSAELTFKFENLRRLLYLFVDSLFGLIILTFATSQWTNISTNFWAAIHLYIEQLETLITWLTNNPAGLKLNDALNTFLANFFFYHIHLWKTYVTVFEHSLTNWLLIVAFGALGFSVLVAFLSDFLRVLTVHIFCFHIYTHRLAKVSCTAFVGLGRAFRSKKWNPLRRRVDSVPF

SEQ ID NO: 163521 - protein, 199 aa, Heterodera glycines
MATQNGAAMATDLLQRKAFKIGIIGGTGLEDPHIMERSGEVRVETPYGRPSDALIEGNVAGVPCVLLSRHGRRHQQSPTNINYRANIWALKKAGVNVIVAACACGSLREELEPGKLVLIDSFIDRTTKREQTFYDGLPGHPPGICHMPMHPALNERLRRALLATATRLGAAHSDRGVLVCVEGPRFSTRAESELFRVWG

SEQ ID NO: 163522 - protein, 121 aa, Heterodera glycines
MDEFDEDAAMAQRPMPKWKKAGLRIERNCAENQIFLSIVQEIVDKFGWDNSAHDYDMWKKAFGPNFSMFFVLDQNRVPMGCISMALYPQVAHWSMFYVKDPYHGHQLGRALARRALEFAGD

SEQ ID NO: 163523 - protein, 252 aa, Heterodera glycines
ERFNFALDCAAPQLADEAKVKLLMTKLSEVAFSQYSKSCLPKKVIDFDYSQTEERLKIAFSRPQSIWIDRYECLRASKSEDESFRPFINRHKRLLRDFQFEKLNEEQFSCLMLLTALKSPKDAELRKRILSKLAADGDLVEYDGVVEDLQMYQSTIAEAKVLEQQPMGSRNLMATKLKAKKKRTNSDHSSNESSISTGTRSSNRSQRVCWRCGLSHSSRNCRHETTVCRKCKKSGHLERMCAKHQAWLKKNG

SEQ ID NO: 163524 - protein, 152 aa, Heterodera glycines
LISKADRKQIYEYLFREGVLVARKDFELPRHKDIPVSNLAVLKACQSLESRGFVKSQFSWQWFYYTLTDAGIEYLREYLHIPAEIVPATFKKVRAAASRPDRPERDARRPRQEGERESYRRADKKEGAPAGEYNPQFRGGIGRGRPAAPAQQ

SEQ ID NO: 163525 - protein, 157 aa, Heterodera glycines
QVFSQKRRQCLPILSIVFLRPKLARLRRSIAVHARTTHLWADKFWKVACSVDSEKLAFRGQATTAIGAAYWHPMFFTETRRSRSAVQAHLKCASCGKEVNKVYEGTDDAGGGSRNAFGHYTDTEKRTELSGLGGVAYADIERAFAVGGMRSGHRRNA

SEQ ID NO: 163526 - protein, 192 aa, Heterodera glycines
MSAIRKKLVIVGDGACGKTCLLIVFSKDQFPDVYVPTVFENYVADIEVDGKQVELALWDTAGQEDYDRLRPLSYPDTDVILMCFSIDSPDSLDNIPEKWTPEVRHFCPNVPIILVGNKKDLRNDQQTIRDLSRNKQEPVKSEQGKAIAEQIGAYAYLECSAKTKEGIREVFEKATQAALQQKKKKKKGCNVL

SEQ ID NO: 163527 - protein, 314 aa, Heterodera glycines
MRCNLMFMTLMSVMLAMALAGLANAQDNANAETGLRTARSDRVALRKRRFIGDLIDIGKFAFDTGCKLFHTAICDLGKKRKREAVYGKNEPAPNPAAVNEFKVLQSTPIDELVEKVKKQLREVAEKPGFKDLSPVDQEDTLLDAISADDQFMKDLVRESIDDSVVQLRKVTDDFVTYSHANLEGRKAMKKVFDAYENTYKTPKQKLDKVKQLQAEMSDELRNSLKMTTDPEVLKEASFAFGDVPTFTGITKRVSVLPPKYLSIKGHEQCVDKYPTGSMYKVCLPAKKKYECAEDAWKALNALEGKDKLETCPSY

SEQ ID NO: 163528 - protein, 300 aa, Heterodera glycines
MRRFKSSGLYRRFGMIHRRSGVHSGPAFLVWHREFLKRLELVFRALHPENSEPILGLPYWDSTLDHDLPSPEDSVMFSEYLLGEPDEAGFVTNGLFANWTTMDGRHSFQRMFGDQDDGEFINDARIDWVMTQDIVESVMAFTLPTQNCINYEVDDRFLEYSHDYVHYFISGDMQERFSSSNDPIFFMHHGFIDSIWEHWRQNKQSRLQRETDFPRNDAACAPRWHFSEEFMPMLQPLWNIDVLSNNYTDNMYEFMPRPSCARTGKSEECGSSDYLWCDSRTNGGHAVCTSKIKPGGDLCR

SEQ ID NO: 163529 - protein, 222 aa, Heterodera glycines
SSCPSGHQQQMNACQKLKRPTPPITTYSSVGPERDCPLRKDRAEPNWTETDEAICDDSDLIGIMQRQYVNLPHSTQKAARRTNAVRQRMVADATESSDCSSDVTTPNGAIMEEWASLATEGDGAAMARENGSEKSTSSSRTGVDSLSALLNRRVSPPHHHSLSPSAALSGGAASIQLRRATCGELDKSKRGELGHSIFYVDEPDSPSADGPNASHSLAATPS

SEQ ID NO: 163530 - protein, 262 aa, Heterodera glycines
MAPKGKKIAAAPFKTAAKAGAVKDPRFEKATRNFGIGNAVQPKRDLTRYTKWPEYVRLQRQRAILKRRLKVPPAINQFSRVVDKNVASQLFKLLNKIRPETKQEKKQRLKAIAEAKAAGKTVEAGKKPVVVKYGINHVTALIEAKKAKLVVIAHDVDPIELVVFLPALCRKMNVPYVIVKGKARIGTVVHKKTATALAIVDVQPENAKELAALVSVAQANFNDKSDEIRKTWGGGIMGKKSNDMMLKREKARAKEVSTAHLA

SEQ ID NO: 163531 - protein, 228 aa, Heterodera glycines
MNSAEMASPSIDIGLLVLRGNEELIRQKLKRLLAITMPKVRQKLYVHLEQMDVIRALLPAIYINAASIAPKIDLRVLLNRTTSVPVDRVFYDEVKDPSHPIFPMLREENGPTFKMDSFATSHHKLPEKPYDHVVLGGTFDRLHNGHKLLLSEAAMMARTRITCGVTDGKMNEKKILYELMEPVETRCRSVTEFIGDISEGIECQTVPIYDAYGPAIVGDHYQAIVVSD

SEQ ID NO: 163532 - protein, 257 aa, Heterodera glycines
MRILVGVKRVIDFAVKVRVKKDGTGVVKDGVNHSMNPFCEIALEEAVRIKERKEKEGGGPVEVVAFSFGTQKAQETLRTALAKGADKALLVEVDNATEEKLEPIHVARALAKLAKEDKYDLLLLGKQAIDDDANQTGQMVAGYLNWPQATFASKIEEDGAYIKVTREIDGGLDTVKLKLPAVVTADLRLNEPRYATLPNIMKAKKKPLEKKTAQEFGIDMTNQTETLEVSDPPVRQAGGFVDDVPGLVSKLKEKGVI

SEQ ID NO: 163533 - protein, 185 aa, Heterodera glycines
MDRLEFRDFPSSGGGASSEFFNSDSVNNKPPPDPAFPSGNLLDVSSSSESQRDDSSKVHFLSLSFYRRFFDIDEEQVFARLLNSAMPRRTGNFISDFVHPNPDLRGPFWVSVSLVFSIAIVGNLSRFLHTFGSDELFISDFSFVTGATSLVFGYVLTMPSLVYAFLWYHRPLNLQYSFLQFAVCL

SEQ ID NO: 163534 - protein, 109 aa, Heterodera glycines
MGKVSKTKSAKKSAGGSGNKTVIWAVEDIVDGPKYETIGTKRQKLYKVRWGETYELASNIPPGLIDLYEKREKKQIKILGPIGHQRIFDQRRVAKPEGENSAPSDEIRH

SEQ ID NO: 163535 - protein, 220 aa, Heterodera glycines
MFLGARSALFIDRKDAGQKLAKALAHILPQRDNIVVLALPRGGVPVACEVADAFQAPLDLLMVRKIGAPGHEEYGIGAVVEGNPPELVMNEEAVRITRPSEAYVQQQMQKQLKEMERQRKTYLGDKPPVSLEGRIAIVVDDGIATGGTARVALKALRQKNVSRAILASPMAPSDTLAELRAEGNEVLCLETPPNFSAVGLHYQRFDQTSDEEVIRCMEKA

SEQ ID NO: 163536 - protein, 202 aa, Heterodera glycines
STPILKSVRSSGGGSPCSTNLSVAEGSKNGGGSSGSANAQQGTNGSGNNLFIALFDYNARTDDDLNFKKGEALEILNDFQGDWWYAKSLISGKCGFIPSNYVARESSIDAQPWYFGKLRRIDAEKLLMLGVNEHGAFLVRDSESRHNEFSLSVRDGEVVKHYRIRQLDNGGFFIARRVTFGTLQELVQHYSEEADGLCVTLT

SEQ ID NO: 163537 - protein, 199 aa, Heterodera glycines
MPEMFPPSQFLPFSVAITNFFPFAECLLSVLLFALSVGMVRGMNAIIRVLYITLISRPGAEPPASPRLAELDEQIGDIRRRMSALSPTDEFAQYFKLERLANKLEEERKKICVPSRKIVPAFSQKFALGMRAVALFISLALALHSSTETRLFTICADHFYPFNFLLDFPFSIAAFQWTNQNDDVADLQQPVGLFSFSIL

SEQ ID NO: 163538 - protein, 184 aa, Heterodera glycines
MFKKFDSAEDVVGSQQLKGSVQKSIRAKLVEQYPSIEPYMDAILPKKENFKLVKCKDHLQLIADANGTVHFVKSRDLANYFPTLRLLHKYPFMLPHQQVDKGAIKFVLNGSHIMCPGLTSAGGRLLDDCNEGALVAIMAEGKQHAMGIGQMKLSSANVRSQNVGIAIDNVHFMNDGLWRLTTVQ

SEQ ID NO: 163539 - protein, 257 aa, Heterodera glycines
MFLSNFVAQTLPTMTEEWKDAVLYAPYQKEQALMYQYADTLAVRAFLMMADLSFVLEQRPNAEFMSPTGEVPFLRLQNTLVAEFFPIVDLVGKKGIRPSNTLSAAEQADIQAFCSLIEETLRNAEKYLSWLDDESYELVTKKRYGSVYLWPLNWLLPTLKRREMHNYLADIGWADLPIAKVAERCDKCFHALSIKLGQQQFFVGDQPTELDALAFGHLYTLLTTEMPNKAIVETLSKYPNLIAFCQTIDKEYFSQNF

SEQ ID NO: 163540 - protein, 204 aa, Heterodera glycines
MKLPISSNKFNKYELYKFRHATMAIVENIGFSTSNSSAVSSLSFLLRTYFEQLCRDSLNSAINSGRAEVGLEDVSYVFGANGINITELHDYIQQVQPYAADEHPLFPVTEPLNVPPPSSEIADTSEQKNGERESAGNDGAEVDEEGNREQNNKHSLNSFNSRSNVRNAISQKIFPNFVGAFAPNLGFSVRKVELPTENVSVDQH

SEQ ID NO: 163541 - protein, 190 aa, Heterodera glycines
RLQFSAMENVVAAADVAVDNFEERTRQFFAFVNEGNIGQLRALVDSLNADELSNLLRMNQPNVQPPRAALINAIVKQHTEMLEKGADPHQTVLGRLNNLDMNVTPLWTAVNMANLDMCRALIAHGANIELGTDSGESTLLCACFEGSFEIVTLLVENGANVNLADSDGMTPLIVTCYFTGKIDIVLLLLL

SEQ ID NO: 163542 - protein, 203 aa, Heterodera glycines
MTSTSPPLTNGVANHLSENGSATSPELIVFRSIVQDLVSYVDRFPNPGKSVRGHTFKTFCGGKRANQAVMASRMGTHVTMVSMDGDDLFAAENVRSIAQNDVDVSLVKQLSGQTTGTTTITVSRDGENCIVVTLGANTSLGAECALAIEHTVARARLVLCQQEIDQQGTLTVFRIAKRHSVTTFFNPAPGRADIDRTILPLCD

SEQ ID NO: 163543 - protein, 197 aa, Heterodera glycines
RPICDAKTGNYQPQQCRDEKHCFCVNYLTGVRQNKKEVPTNEILHCEGGQVDFSIDDSHIIKSEKGEGEKGDEELIPIGSPVCKKPRDAGHRCHGRAGGPIAAKNLKWYFDTETFDCLAFSYNGCGGNGNHFDSPADCWDKCKLVDLAGCAGMRLPATDKQGHTIICAGAGYPSPTAACPSGYRCTMLAHMGVCCHS

SEQ ID NO: 163544 - protein, 236 aa, Heterodera glycines
MSGGIYGGDDVGALVFDPGSHSFRVGYGGEEFPRFDIPARVGVCPRPSAGTDASQTADATIEEVASGRGANASNKFDHYIGTTKLNVPRAGMEVKPYMREGMVEDWELFEKMLDYIYGPCLGAESREHGVLFTEPPWNPKEKRQRLTELVFEKYGVPAYYLAKNAVLAAFASGRTAGLVIDSGSSHTSAVPVYDGYCITNSVVKSPVGGDFVVDQCRKMLVKEGVDIVPYYKVASK

SEQ ID NO: 163545 - protein, 214 aa, Heterodera glycines
PIVHLLSVHYHIPTTIQSISWPVALSGRDLISIAKTGSGKTLGFILPAIVHTMAQPPRRPNDGPGVLVLLPTRELAVQVEQVAREYCKLMKLDVTCCYGGAPKAGQANDLRRGVDICVATPGRILDFMEANTTNMRRCTFLVLDEADRMLDMGFEPQIRKIVGQIRPDRQSLMFSATWPKEVRSLAADFQVNPVHLNVGSLELAANHNIQQHVE

SEQ ID NO: 163546 - protein, 244 aa, Heterodera glycines
MLPPGEWRMTDLLLDPAIRTWVFVPIVLITFLVGIVRHYVFLLLVTKKSADLQSVRDSHWLLKARLLRENGRFLPADSFAQRRWLLCDEQHGQLVKRQDKQNTQPNPMLDPSTMTEMVKGNMLNMVPMLVIGGWINWTFSGFVTTRVPFPLTLRFKPMLQRGVDLQSLDASWVSSASWYFLNVFGLRSVYALVLGGENAAEMMDEQAMLGMAQPQMVAPGQDPKGAFKSEWEALQLYTHTFNPR

SEQ ID NO: 163547 - protein, 195 aa, Heterodera glycines
MSQSPQMATFSGLTANIYHEKQKRQLCLLHTLNNLFQREEFVRDELDEICERLDDSKWFNTHRSWLGLGNYDANILLCALKTRGLVGRWFDKRMPASWIRKEVIVAYIFNIPSTGFMPLPFLNGRHWFTIKQFGPTYYNLDSKLAAPTLISTANGIVHYINSLLAQGNELLLVVRPENEANCLLANGEEEHGGGE

SEQ ID NO: 163548 - protein, 206 aa, Heterodera glycines
  unsure (1)..(206): unsure at all Xaa locations
DFSDECALRIRSGEEKPQRETHATAIPLPXAANLFLLVKKIITESTKLFADPNAVLSKLVELFRQCLRQFAHGCLSAFLPQALPGVSPGAGGIIGASTSILQNLMRDDSVVRLDADQTFFTCCVLATADWSAETTMQLQDKLRQKIADGDFGQETDLFHSICNSALMLLVQDAETMCEPSLQAMNKIDWSNVDQVGDESPYVSTIR

SEQ ID NO: 163549 - protein, 208 aa, Heterodera glycines
GTPRQLSAFFGIAMAFPLLPFFFLFPLALVPLQRTAAVHPPLFNRIVPTSERTVNLTLTRDFGEAKAGNDESANNSNLTASPVEAKIHRLKELRNEMRALTAMIKEERRRSKSKDIRHRHRSIAEKMRTEISRQFRKWRKKVLSKIHLVMQRLDQLEGEMHRTKDNLQKVMHDNGREEGGKWGGGSKKRRPPPSHSAESLSAVRRVQM

SEQ ID NO: 163550 - protein, 117 aa, Heterodera glycines
  unsure (1)..(117): unsure at all Xaa locations
YGTVRWIKLEQCVEGAGTRLSKPYISLLSIYPLLQLKHCFRRGVVLLESGANSYXRLCDLLVDEWTHSGQLGEDMANLVKDIIYAPKLHLNQGKLRKVNESNGKLKQMEGEERVWKT

SEQ ID NO: 163551 - protein, 107 aa, Heterodera glycines
  unsure (1)..(107): unsure at all Xaa locations
VGNQLELLLDFRTNSWLSLGWRPLNIPPSCRLFPQMHGTXSRRSARGGRSADERIWLVVTWRTNGHSLAANSAKSALSLPLHPMDCTDVIMASVLEGTDLLHIADMY

SEQ ID NO: 163552 - protein, 67 aa, Heterodera glycines
VVRTRKCLSPISCGVIHPSVSPFICCFSLGLLLDSDGGRRRLFHVLLSDAEGVEVSIQFSLERVTGN

SEQ ID NO: 163553 - protein, 162 aa, Heterodera glycines; identical to SEQ ID NO: 159253

SEQ ID NO: 163554 - protein, 368 aa, Heterodera glycines
AAGFRERLTHHFYAQYLDGFTFYKMTNLDNRIANADQLLTQDVDRFCEGIVELYSNLSKPFVDVLLYVSRIGASIGWQAPIQLFVYLLFSGTALTYLRRPIGRMTVMEQQLEGDYRFVNSRLIVNSEEIAFYQGNERERVSVLNAFQRMISHLRSLILFRFSIAFMDNIVAKYVATVVGWSTLSRPYFNEQNEGMMRKDKTELMQAYYTTGRMMVKLADALGRLALAGREMTRLAGFFFRVDQLMHVLADLEQGKYQRTMLSINADSKNVANGNGGLVVIEQQQKLNNDDQHSNSTTAPSSPPALLFSSSSNSSSSCSLSSFRPGSGHVLVQDNLIRFQQVPLVTPNGDVLIRSLDFEVPSGTNVLVC

SEQ ID NO: 163555 - protein, 202 aa, Heterodera glycines
MTLEGERGGLHALLTARLDEDEQFIATINYLNDNLRLDAETTEQKLRMVLEDRELELNQQYLEQLEKMNDRVQGFVQQIRSMNSICCELTERIQTNKEKTRELLKRTAVLQTEKRELGAKNAFLDEFFAKYSLNEEEETALALPNQQGSPSDAFFSALRRLLEVEKNVTEQLALEPNSLALMELSHLLGDKLRQTYATLYAC

SEQ ID NO: 163556 - protein, 183 aa, Heterodera glycines
MPFANFSVDSILSTGEGNSGTSKCHNSFRPSVVFASSCHGCLTDEGSSCFEMRPFDSVDTEFCPRAGDDDTSLVISRWALQCIRMIAGDDAKMTTMKTVNADSPEQISPTDAANSIFLNPSIALGNGNAFPLFQQMQKAKRIRTAFSPSQLVKLEQAFNGSQYLVGSERKVLAKQLALSETQV

SEQ ID NO: 163557 - protein, 355 aa, Heterodera glycines
MALPNRPPYLPDNWDNDVEMSGLMSFLKARHVNSTNYDRVIEFWKRVISDYCRHQKNCIFSLDELKLKFKRGTQLPSPLPTVVMEMQNAGLVQSKEELEKQNQGWLQWSISLLKPNSWLPGLANPTDAGKRHPFELVHIPTLKQQAKELLRFYRNHFEMFADCSDVVDYNDLREQTAHLMDERCFDLVINELARMGEVSMGSSKSGDRVLKFKDQSSKGPARFTETDANVHDLKRTMQRLDLDIKNAEKREQSLKEEARVALGRKDKKGALNIMRKVARVRKDIQDKDVQYQRLLAMLEQLAASKQTKEIIDVYKQGSNAFRETMARQGLTPDKVDLTMDGVLETMQDYQDVEEA

SEQ ID NO: 163558 - protein, 262 aa, Heterodera glycines
MHLFHAFLHRSLLMNLPPSSSSSPVLFNRLTNRQTLAFSAIVRRVTRGFSTRQRNLYKVLGVSPSASQSDIKKAYYTLSKKYHPDVTGSNESCAKKYLEIKEAYDVLRDEKQREEHDRWLAAEEVQRQRPINGRQPYVRRQKVYDDLWPNNGTFSDEEIRRIWRSMSGNSEFGRSNWEFETEVKRKRQMAYEEQTRRRNEWAKNGFGQNNGRSDWTDQDQYKIIGKILLCYVLITFFIEIFSASLGLFRDPFLPPYNREEDI

SEQ ID NO: 163559 - protein, 181 aa, Heterodera glycines
LMLVGLDHLLPVRPVALCLIEYSSTLSPSFLFVHFISNFSKSSSSAGTSDHHITFVSLHTTLGLLRMVMGKMAQRLNLDTFHFVSVSDFLGDSLLFDCDRLFSWITKEVLRSVLPDRPQLVVLDDLFLSHPSIRPAKLLQFLLALFVRLPDRSFFIMATANATPLSAYISNFFNFHIRLTP

SEQ ID NO: 163560 - protein, 289 aa, Heterodera glycines
  unsure (1)..(289): unsure at all Xaa locations
AICALIERAQNYXDTRRQSGAIDQAEILIIYGLRIEHLYYKYSSNEVEDEQLMDSLCKIVYAIGNAPLARQRAMLCQIYHHALHDRWHKAKNLLLMSHLQALVDHSDASTQILYNRTICQLGLCAFRHGFVREAHQNLSEIQNTQRAKDLLAQGIPPRQSEKTAEQELKERSLQVPYHMHINLELMECVYLICSMMLEIPNIACYEYDVRRRLLSRSFHYQLKFSEKAALIGPPENTREHVVAASRAMLRGEWIKCRNYIINDKMNAKVWNLFRNSDAVKQMLIQRVQE

SEQ ID NO: 163561 - protein, 115 aa, Heterodera glycines; identical to SEQ ID NO: 140217

SEQ ID NO: 163562 - protein, 211 aa, Heterodera glycines
TNNFLKMLSRLSKITVRGYAKDLKFGSEGRKAMLSGVDMLADAVAVTMGPKGRNVVIEQSWGSPKITKDGVTVAKAIDFKDKFQNMGAKLVQDVANKTNEEAGDGTTCATVLARAIAKEGFENISKGANPVEVRKGLMNAVDELVKELKAMSKTVTTPEEIAQVATIAANGDKTIRKLISDAMKNVGNKGVITAKDRTTLLDQLEFIEGIK

SEQ ID NO: 163563 - protein, 245 aa, Heterodera glycines
MQMMEPPKGKKSKNKLPNGLRPLLEAFARESLRSQPTDLAQFGQIFFETLIEQKMRNSESTVEALLGDKFNYDIFRSELHEKLKKFSSPQQNGRPKSPMDIAATKIQAIFRGHMVRTHPEKFGLDAETMDGLNQKMRRNSNERLETVDFKKDLKRHSIGGYSHAEQTNATPEDRAATKIQSEIRGFLARKHYEQQKKDSSVAATKIQAQIRGFLTRKRLEEQGFVLSPPRSRASTRASAGDVKAQ

SEQ ID NO: 163564 - protein, 373 aa, Heterodera glycines
MIASENNHLEAQNGNSPEGEEESNCGGSASPSSLRDCHSRASTNEHTNISHHSLHDDNAPPSPSLANISTNIELHPHNNALGGSSSHKFIKRPLNAYMIWTRQERKRILTDDPKMKMNEVSKAIQMGEKWKKMSDKEKKPYFEMAKKFSEEHKLVLQEHPELQYAPSKKKVVKKLADGKQLSVVDSSSVKSCTITPDASRSTTPRGSSNLITPQPVSQSQMFSPFQSPTVQLAQVLQGVRSVTNQAAISSNSPIQNPLLGSASTFPQAFLQSHSLPQRVANSSVSLLGGMSQSGTTPVSAATRTTPGQMLDLYYTSLCQPAFPSITENPVNPLGMYPSHYLLEQYNQHLSQQQQQQGNNGGTSNASANGGGRF

SEQ ID NO: 163565 - protein, 174 aa, Heterodera glycines
MGRRLPNVLVTGTPGTGKSTLAKKVAQNVGMEHIDTALIIKEREFYAEYDAQLDTHVLNEDALLDHLEERFGSDAGGLILDYHCAEMFPKRWFDLVIVLRCATDSLFDRLTERGYSERKRRENLEAEIFGIIAEEANASYDESVVHELENSTAEQLEANVRTVTNLVGAHKQRK

SEQ ID NO: 163566 - protein, 324 aa, Heterodera glycines
AVRGEDKENRGTTDTAKYGVDYDEMDKGSQQRPPPHPSDLPQSTSLRYPSNLSKISESPDEFSFSFKRGENAIQQFNRDHEELRRQNHLRLPSVSFHTSHYSMKHSWEESALRLQNATHCSFARPELDLSTVDVTETKQQLSSIKNQTVANSFSAFPNTSASNQSAAASPQFLSGSRHCIYFGFCRLDFESEQTLILRNRHPRGERVQIKCEWTVNTTNQPHYRILYPRETTQSREHTQILGSEQAAKVVIGFTPSDCAYYKNFLRIECKSRDETREYYFLVHGYGGRAVVEPTMEDRSANLCFSTNGQFQLIVRSISKFRFWL

SEQ ID NO: 163567 - protein, 93 aa, Heterodera glycines
MTSSTLGATIIRHSILALRTRSAMPKQQKRFRRQCRLSKTTMPSRARSMMMAFSLYNNNIPPTTPPTTVGRRMAFLLSAKNCRRTNSKSRRCC

SEQ ID NO: 163568 - protein, 423 aa, Heterodera glycines
PSPTPEVTFKDRSVHEIHLENGYTYVIEQNLKHFASVITVLAKFSEQILLQPTEDGLMLSASSSARSAYAKVKLCRQFFDRLRARENLGPDGEVFCRLATKSLMHIFKSAAQSSVGPVPSCSLELDPQSDFAYVHLQCLSGIRRCFVLSLREYAMVCDNVFNERQRLKNRVTAHAKMLATLLSPLDCSDLELVALADRFTACRYIPREEYGKVRRTEVQIPVDHCEQYRIEVPTRVVVNLRELRPILQFADLCGMSVSLHFDRAGRPLIVAVEENVDFAAEFVLGTLDEQLPLNEQQQQPTPQQQQEQQPVVQQREEQPPQHRHNQMLRHHSPAPAAVAERVEEEHNETTPNRDQMLMVQQEEDVQLSIRSTPILPIAALRQEEHNETAPNHGQMSIGPTPILAVAATVQQQQEAHNEISQND

SEQ ID NO: 163569 - protein, 200 aa, Heterodera glycines
MNDLLPLPNSLSSPSLLSSSSSSADAVKEYRLVLLGTQHKKPLFEKMCSAAQKFEQHIQYADIWYLTFQFKDSEEPVVVEITDPGTEKTGERQMAIQQKSDAIILCYSAFNPGSFLALESVTEDFQTFNGKPPATLLLCNEDQLAEEGFEDGHETDTADDGYGTNSGGGSPSDREMPPQTVPKRRSTTPTGRQHSMERIR

SEQ ID NO: 163570 - protein, 209 aa, Heterodera glycines
MTRSRSGSRCGDVVRYVLGQNTHQQSYNQHIYDDIDVFLDFSHCRPSDQERALFFELEAVLQFAQRSADCLAIYGAGASAEVRAALQNCDDADIQNASFAIVRQFVRRIRKYFETAQRIEKVVPELLWELCSGPLPPVEQLDSAQALCKQLARLIDFVFHFEKMKMNTPGDAGTTFSFFRRVISRKQAAAREAETDCSLELGHTISLFL

SEQ ID NO: 163571 - protein, 92 aa, Heterodera glycines; identical to SEQ ID NO: 148997

SEQ ID NO: 163572 - protein, 69 aa, Heterodera glycines
FFFFFFLFKQIYFYATVRHSAAAKETKKKNSKNNKSAKFHVKKDKVNQIFLGADFSPRFSASLFYCRVQ

SEQ ID NO: 163573 - protein, 165 aa, Heterodera glycines
VTFFLMLATVRFHSVTNNRIDCCQQTLFSLDDSENLPGTDFSVGKAKSKLLSDGRREQQKMAKKTNGGKTEGIGKTAAGGSRGSDSLLTDEVQLDGGAADGASDDESGDFLPIALGTKCAAGHAEENGRANWAANWRLSGRRCLKRASVVLGCCFPWAVGFKQFK

SEQ ID NO: 163574 - protein, 104 aa, Heterodera glycines
MPQLLNKKGGTFKLKPHKAIPLPIDSTGAFTLVPKSLKEDKVFLFGELMVEDEYNPTAPTDYSSFKQKREQQRLKEKIAKEIADRLAKEAADEEDKRRKGAAIA

SEQ ID NO: 163575 - protein, 202 aa, Heterodera glycines
MSSASSPVPSLILNSGFPMSQIGFGTWMCKPTEVNEIVKSAIRNGYRHLDCAFIYQNQSEIGAALKDMLQHGEIKREDLFITSKVWNTFHSFDAALANVQKSLEQLGLDYLDLCLIHWPMGYKEGTELFPKDAEGQKVFLSDVDFLDTWRALEKAVALGRVRSIGVSNFNSAQIQRIIDNCNIRPSVLQTECHVFFQQKKLR

SEQ ID NO: 163576 - protein, 330 aa, Heterodera glycines
MGSFSKLAIDQLELKGKRVLMRVDFNVPIKDGKVTSNQRIVAALSTIKYAIDHEAKSVVLMSHLGRPDGQAQAKYSMKPVHEELERLLGKTVVFLTDCVGTEIENATADPKPGTIILLENLRFHVEEEGKGKNSAGETVKASKEAVNAFRASLSKHGDLYVNDAFGTAHRAHSSMVGCAMEKRASGFLMKKELEYFAKALESPTRPFLAILGGAKVADKIQLINNLLDKVDEMVICGGMAFTFYKVLTGKSIGKSLFDEEGSKIINDLMAKAKDKNVKIHQPVDFVVGDEFKEGTPFANVDAKDGIPNGKMGLDIGQETLKQFAEVIGRA

SEQ ID NO: 163577 - protein, 127 aa, Heterodera glycines
MAEETSKTSENIAEDNGIKALDSLFAAVAHASKCLASAAGTPNFCLATPAFLAFMVWCCFLMPPVAVLFRSYRRDGNAFTVQAAYNVILCFFLWVPGMLHALWFCFGETVRMLRRRVPPSDDAQKNE

SEQ ID NO: 163578 - protein, 83 aa, Heterodera glycines
MHFLLNFKLFASIFLVLCVVSFVVCQDKPAEACLHPKDEGTGGLALTRWWWDGSDCEEFTYKGQGGNTNNFPSKELCDDVCKP

SEQ ID NO: 163579 - protein, 150 aa, Heterodera glycines
MEHMWSCATKWQWEKPGVSMKWEITDTLTEAAVDTDCPSRKNRMNNCCYLQTECYNKQIGQKSCDNQFCECMERATAGKKRCSIWEGPGFCRHYRLYGESAYRAAAPPFWSSCGTVLNSEKYLGCPCGTYKTWERCGFLYMGYRYLCYAC

SEQ ID NO: 163580 - protein, 224 aa, Heterodera glycines
  unsure (1)..(224): unsure at all Xaa locations
DSLRRLAFFGVALSTVSTLICVLSVPMVYSYVQHINSQMMAEVDFCKMRSGNIWREVTRTQGMHAXTRHRVARNADACCGCGESPRGPPGPPGPDGNPGGDGQPGGPGQPGAPAQAPPRPKPSGTGCQTCAPAENGHPGPQGPPGQPGAAGEPGAPGYPGKKGPRGPPGPAGPDGKPGDAGAPGQPGAPGELKPGPVKVGPPGPPGYPGKPGGPGQPGQPGEPG

SEQ ID NO: 163581 - protein, 181 aa, Heterodera glycines
MSKIPKLAPAGLKNRAPSPFIAWLRNALLKVKRDPTLTPPSNIPKPDEQSQFRPHNRFPNTQSSRSIEPAMAQGGVHHKLADNYYLERDGRREVRPPKPIYKALGETPLWEKPSGGQSLTTEQMGKNIGAAINKGPAQNYGISFPTPGFGYEWKRNAEVEQFTQQRNAEFAKLEKYDKFVK

SEQ ID NO: 163582 - protein, 186 aa, Heterodera glycines
  unsure (1)..(186): unsure at all Xaa locations
FAAPFHCRHSKIPNSTLPGQISTFGSSFRGHLSNLFGSVQQWFNTSASARVVSSADEAFTPSFEQSALSPPLSQTHMNSISSQGLAEPSVMNNSNTNLQTFREVLFNETVLKLLRRYEFVGSIGSGAQGLVICCKDLLTNQRVAIKRLTRPFXNVIHAKRAYREFEIMNLVNHRNIIKLLYAYTSQ

SEQ ID NO: 163583 - protein, 260 aa, Heterodera glycines
LIRFPSQMPFLSLFSSVSAFALLSLLSFSSSVHHFHHNHHSDSSKGHNGHHQQKDHQTAQEIPSNSFPCACGGHSSGGENARWMNGMPANGVPLFLFPDNVLRLVGVVLRSENAFHRDNNELARHLFHLLAHQFPRKWFIVGIGTMPSNGANEPKMWAREGIDALNGTVQLQSPPGYGSFPFLDGRRFQRENGSKIWYFVYAVEPMTDKAKDGLPKQSLAKCLSEGCPSRDNFASLCANNRRQLGTVVEFDQSSEMSIFA

SEQ ID NO: 163584 - protein, 82 aa, Heterodera glycines
CIFLQSLTISKISPPTLVTFPIVLFASFLSLFISFRFKAFSVFSLSLHSLRVFLFNYLFSYIIVDYTALKKIHVKKKKKKKK

SEQ ID NO: 163585 - protein, 66 aa, Heterodera glycines
FELAAVHLSSALLSLSLIILHFPHLLRHFSWHRPEILGPRAHSQAALFDHTDAQVDATVQHAHIVL

SEQ ID NO: 163586 - protein, 129 aa, Heterodera glycines
MLFASSVFRFFLRPPPKRYSSFLLNTMWSPLFCLLVFAGLAACCVSLPQIQYVNDKPYYLMQNMECRGGKIYEINQVQDIDECKAACVTRNCRAVNLFQLGEFQFKCEILAHVHGYFPAQGAACYISYV

SEQ ID NO: 163587 - protein, 171 aa, Heterodera glycines
MDSVSTIAKDGHGVVKYFCVASLDLPDDGGDNEIVAEKEFAVTAYLNLDAPHFREPAHSSEQITKGGVFCGRIRRVKAELCVEELGLMTGETCEVTLTVENTAKRGRRKSHAGEGHKCGLISLCQQVDFKAKAKTGEWQKRSLTTAVQSQGICKANCAKKPETRRTQFIIP

SEQ ID NO: 163588 - protein, 135 aa, Heterodera glycines
MDPSAPAKKRGRPPKAGGVAKTIAKKPPATTKAAPKSPSKSPAKSPPSSPPQPAKGSPAAKNAVKPAAATGRGRGRPKGTGTSAAAKKKAAAPAGGGTGKRGRPPKKTAQKAKESDTDEHDEGTDPDESASSKSP

SEQ ID NO: 163589 - protein, 334 aa, Heterodera glycines
PLDDSLSEFDRAQLRELDMFEDNSNKFCEVEDENPERMHYVNLAKNPERYTGYKGNSAVKVWKCIYNENCFKPDPKFDKKFLLQPTPTGMCLEKRVFYRLISGLHSAITVSIAAHNYRPAPGGFGTGTWYRNVEFFENRFGTKWGKEGPERLRNLYFTYMLELRALVKATPYIRKSQLFYTGNEQEDRETQQSLEHFLAVLKEFPNQFDETQLFSNFQESHARLLKEEFRLHFWNISRIMDCVGCDKCRLWGKLQTHGMGTALKVLFSDLPRNGNGGKANGRKEQTENGESAANGGLFKLTRNDLVALFQSFGRYSSSIWEIDGFRKEFRHDEL

SEQ ID NO: 163590 - protein, 153 aa, Heterodera glycines
MGRVRTKTVKKASRVMIEKYYPRLTLDFQSNKKVASEVASISSKRLRNKIAGFTTHLMRRIQKGPVRGISFKLQEEERERKDNYVPDVSALEQNELVVDTETAALLASLDIKLPQIRTVAVTAQGERQGRNAVVGANFRGDRGDRPRRPKTQQ

SEQ ID NO: 163591 - protein, 72 aa, Heterodera glycines
KIFPGMSADKTGALFVGDIILAVNGESLLNARHDDAVRALKQNGKMVNLQVQYRRDLHLRRENMLHRLNWEE

SEQ ID NO: 163592 - protein, 251 aa, Heterodera glycines
MIRLIIDEPTQLCATLFQQHARTMLDQVDIMLLLHRQDGEATPGELICRSSRRVLPCVRIDDTFLPRGEYLLCAHSFSKFGEQMVSGTIVIHSSREIQTMKLRTTTLDDLRQSMCSLLLKEGVLQNSSPGIATRYLTNEFAGLVLMVDNYSSDNCLKVHSDCQNSTNVLSTRSSLLAFDSIPPLHRQVVTLLTHFEPSQSFMVTHRWVYHQTKFPQLRDFVPCTEFASAQNFPPLQTETIGYLHGPFPVYK

SEQ ID NO: 163593 - protein, 212 aa, Heterodera glycines
MFHIHRYDKLQWCGLAIHRRTLSLTVDYCRYRQRRPSISFPSSAVRSSDHFRFICNTTNHRFLPLGVGRLNSILHSTVCGVGPSNFSAGFANHLVQHRFLSSKSDGLNVFEPKWKKAILVVLLVSAVIVLIILEARSNLATDEEGEGLEEHRRKEEEKRRGRQERMAANRLPPAEPEAEEEPEVIPWQARSADDDDDHDDPDAPDNWRNRTN

SEQ ID NO: 163594 - protein, 209 aa, Heterodera glycines
MLRKLKANRERPPSLIFIIRDGLDEGKVDNALSSEIGLFRESCSQISQSWKPKFVYCLADKRHNRRFFEVEERLPDAAQPRNVCNPQPGSAVDRKLTRSGVLNLYVQAHHPVRGTAKIPEFIFPCNEVCATKEELEAFINGLCHSWQIVKAATSLPVPVYQAHELAKRGRSNYMELRRMAPERIPRSVVFSSDVRTIIRVALLQRQSSQ

SEQ ID NO: 163595 - protein, 200 aa, Heterodera glycines
LVLMEGIDQPVTKTCTIVEKDYDQHELFIFRPLKFNTCSVVKLSIEPINPSELPKMLDSLRKVNKSYPLLTTRVEESGEHVMLGTGELYMDCVMHDMRKVFSEIDIKVADPVVSFCETVGETSSLKCFAQTPNQKNKITMIAEPLEKGLAEDIEGEIVKIIWNRKQLGDFFQTKYEWDLLAARSIWAFGPETNGPNIFLD

SEQ ID NO: 163596 - protein, 99 aa, Heterodera glycines
EITNSGKWDCIILHDVDLVPEHDHNLYRCFKDHPTHFFRRFDENNYAPLPDNNFGEVSGFTPEQYQRVNGYSNLFWGWGDEDVDMFNRILSVGYPDERK

SEQ ID NO: 163597 - protein, 207 aa, Heterodera glycines
AAFICPFRFLLLFLALVIKFHPLRSFWPSLPQMTEVPPNARQWTLHFGGLVEAVNGAHIDPSGRTDLLKVLDRAKRDGSLQLDGGEITLLECDCDAVRVSSAKVDESSKPLAFIPLHQLSSVGFVHEPPQNILALKVGDVDENKPDQFDLIILYTSTEEMAGEICQYLAFCFQFIYREALSTLEQNEHEREERKKTPQQGDISAKFA

SEQ ID NO: 163598 - protein, 172 aa, Heterodera glycines
MVTSSPDIQLIFQSVDRDRSGQISADELQQALSNGTWKPFNPETCRMMISMFDSNNDGGINFQEFGALWEYINDWTRTFRTFDRDNSGNIDRDELVNALTQFGYRLSGTFYDMLMRKFDRTQSGRINFDDFIQLCVVLQTLTTAFREKDTDRDGWIRIYYEEFLAMVFSLKM

SEQ ID NO: 163599 - protein, 260 aa, Heterodera glycines
MNNYEFAMNSPHMEMAKFKEFMDDSSEEFVALSPMIQNQRDWSPYSNQGGTVCVLVGDDFVVVANDTRLTGDAEIEILSRKCEKTHILTNKIIMTSCGFYGDVLQLRRILELRINHFEFIYQRPMSLDQCGEMLSRTLYSRRFFPYFTGTIICGITSDGRGDLYSYDPVGCIETKLFEASGNGGSTLSTFFENQWAYSTVAPEERKNMPKRTLERALSVIRDAFRGLSERETTTGDSLNVYWLQAGDEKVHQETYRLRGD

SEQ ID NO: 163600 - protein, 110 aa, Heterodera glycines
AAGTAVISTRGSTTVISSSSSSSSSAMLTASSSRAMAGFFAQNTAPSGFNGSADNANEAAFDQRRQRAQSDQKNKSDQTKEGHFGNEVIELVSSCYELRVYETMRLVLAA

SEQ ID NO: 163601 - protein, 161 aa, Heterodera glycines
MEKERDILVSLASKHRTVPYDVLMNALKIANEREFEDFIIESIYQDIIQGRLNPIKRHLEIYDWKNEKVGDFQFMAETLNQWDKHCGNFLNSIGTEMIRSNNTAAEFVANEKAVNEEIENIRKTFSYEDPKKFLGDKDTFKTSSKPEAKKFKSMKNKKPGN

SEQ ID NO: 163602 - protein, 155 aa, Heterodera glycines
LVPNSARGGRILYAVLEHSFRQREGDEKRCYLELPPLIAPIKCSILPISSNERLDPIIFAVRDQLTSREISSKIDDSSGSIGRRYARTDEIGIPFGITVDFESELQPWTVTLRNAPTMQQIRVSVSEIGEVVGHLVKGKMNWETAMAKYPIFNAK

SEQ ID NO: 163603 - protein, 208 aa, Heterodera glycines
MHLSVCSLLLKRLPSTRLATTLANVRAKNVKQPSTERINAISLDDFPIAYPDFLRSEVLDRRDPLFEQLVQADMFERRMVIDIPEFYVGSVLAVTMSDPNTVSKQHRFVGICIRREKQGLQHTFTLRNVIDGLGIEIMYEIYNPTILRIETLLLEKRLDEDLTYLADALPEYTTFKFNMEPVSHTAGKPVPVNPLKVKLKPPPWTLQW

SEQ ID NO: 163604 - protein, 186 aa, Heterodera glycines
AYFINFDVKLAMSFQWPWHFDFPPFFTIQPNLSTRDKQLKAWGRLLLDYCQANRIYTTDLDEISKSDLFNNRRLNRHLDLSGIRAVFDFLELQKHVEWKDKDKTRCNIYWRRPEEWGQLLYEWANSIGLLNTVVTLYELTQGEDVAKESFYGLDKDVLLKGLQHLENQGKAVLIDIDGEKGGVKFL

SEQ ID NO: 163605 - protein, 154 aa, Heterodera glycines
SSMNAYQQQQQQQLLQAYYSQFQPQGVAGADGQVPAKYKSTLCNIWLMEGICTRGKQCHYAHGIKELNYRQDDTMSRFYKTSLCTFYQQRGFCNNGDQCRWAHGEAELRKGADGSSNGLANYYAATMQAMATGQQNANGSSAEAAAAAAAAGWN

SEQ ID NO: 163606 - protein, 192 aa, Heterodera glycines
MMNLFKFRDIVLLRTIAFPPNFVLNRGINYRENSTIGSKQSIGNADEFKLREFGQKYLGKKEVKFTEKLEFRSSANEVPMPIYQCINSRGEFVDGSEECPLPKEIAVKIYKEMVKLNTMDKILYESQRQGRISFYMTNFGEEASHMGSAAALELRDLVYGQYREVGVLLWRGFSLDQCMNQCYGNELDEGKG

SEQ ID NO: 163607 - protein, 168 aa, Heterodera glycines
FQKLKTVSAEKKAFSGKSGIFGENVEQQRRRRAWQQRTRFTAPDGRRKGRTSRNRAKFVLPMRKPTTGTEHQRRRRAWQQRTRFTAPDGRRKGRTSRDRAKFVLPMRKPTTGTEPAKSILTVVMAQLRFELLRLLRLGLRLDTVTNPMKGTTLHAKASTVDQCDKMVH

SEQ ID NO: 163608 - protein, 207 aa, Heterodera glycines
  unsure (1)..(207): unsure at all Xaa locations
MKKFDYLVIGGGSGGIASARRAAEFKVKVGLIESERLGGTCVNLGCVPKKVMYNTAIHAEFLRDHADYGFDSMNVKFNWSKIKNSRDEYIRRLNSMYQTNLENSKVEIVRGRAKFNKDGSVEVSRSDGSKETCQGTHTLIAVGGAPRIPKDVPGAKYGTSSDGFFGFEQMPNKTVVVGAGYIAVELASILADLGSEXHLLIRYDRVL

SEQ ID NO: 163609 - protein, 195 aa, Heterodera glycines
RLPTEDNGTTSGENPSHQLDDGDDVHQFQLPLAFRSSLVHPSTTTAQNVHHHQLLQQPQLNIIVPSMECVSVIHPKREQQFSASVDQFLDGEDDLFKTEPLDLSLSSARTKANENGTMVGNGATVAGGIQRRKRTTNKRQMVEEMCETAATGRKVTPTEAEKRTSPPSAVGISLPPSVVPPSGTLFTPLASPSAV

SEQ ID NO: 163610 - protein, 195 aa, Heterodera glycines
  unsure (1)..(195): unsure at all Xaa locations
MSQREEPRPQIKAKLKNSLIAFHLFLLVSGVVLFSFALWLQFDPAREFLLRLVHFSESTPFFEIAVYLMLGTSLFIFIAVGIGFSGIWKLERCLLSGFSVLLLLLIHCKLLILILLVAYRFKFPDDTVMTEYLSKMAQHHYHRDKWATPLMDSVQFYXNVAEETVRKTIRSHFGTKRTPKWECQQTAQDARAWHL

SEQ ID NO: 163611 - protein, 84 aa, Heterodera glycines
MPAVPSGYQVVQQGRQGPSCMDKLKLGFAMGVLIGGSTGVLIGTFTSLRMGLRGRELLRQTGKIAAQMGGSFGVFMTVAQGIRC

SEQ ID NO: 163612 - protein, 252 aa, Heterodera glycines
  unsure (1)..(252): unsure at all Xaa locations
MDPPDLSETQPTIPKRGHHHRRRVDISASRLPRAVLVRIFGHLSVAELGAVSLVCCSWKFIVDSNDFDLWARHARAQLPESALSDPYLFVNISSHREMLRAFKHAWNPSDCSRNAFVRTNGFTVHRQPIAQSTDGIRGKVGVSSGAHCWEFCWEGPLGTTAXVGVATKHAALHCPGYLPVIGSDDQSWGWNLVNNTIAHNGEFVERYPRLNKRRNDGSKQRKTERTKKVIKTPTSMSLTDRGLMVYFHYTYK

SEQ ID NO: 163613 - protein, 179 aa, Heterodera glycines
LLLLFAFLVILPPVCSRYEDRYNMNMLPWDLKPVQDFIGLWQMDRSSGNFKELPPPNLIDLAINPIPKFGARTMNITHTYLDSARNVIRSDYGFMPVKNATRRDPRVHVAYLTTSSEGWSMMEQGFFKDGKLIFHLKQFLKRSFGAGSNLDIREFERQFELSGFHSMTLKVRAETSFQT

SEQ ID NO: 163614 - protein, 324 aa, Heterodera glycines
MSVEESPLLREFKTFLQATLVAFGSDGAPFSLVNQRFSEDWVGSPSLKEYATKLGYVHPNGIFKLLQSIPDQVTMMVNPTGEVILKPVPMEETRDNLEKIDATNKELKAERKRRQQYQQGPLPASVIAQLAAGICWPPPVPAQPLSSVFNASIERTAPLATPSIATISRPPPPPPMTKKFNPNLIPLGTPRFARCASTSNIAADSSADSGPSASGGPTPSPMVFHPPHQQPQQQPQRSKVFFGQRKKPPPPVAVPRNDFGDLAPPVAVSRNDFGDLAPPVAVPRNDFCDMPPPAAVSRNDVAQTLSSVFKRNEGYYEEDFHALA

SEQ ID NO: 163615 - protein, 186 aa, Heterodera glycines
FFSDRQFIHKEKTREYADRLQEKQNTKFSKTNTKFSMVYRIVTLFSNGGGAVVQMEFVTTFLFVADETDHHNDNEQNGGDGQKNEHQTKEIFAIVQLATIFRSRTVRFVVAGFEGFVSEKRSRLIVRWRMERIGHAVDVGDTVRLVRLKLLRIAVQLLTIHNLCRANETKMDEQKDEEEKTERIHW

SEQ ID NO: 163616 - protein, 165 aa, Heterodera glycines
KLFGYRRKKVTKKDSITGRNNSFPVPYLSKLEGNQLQPGQSLIVRGIIISSDEFVINLTNGPRVELDDEVRTLDDRLLCMRVEMGQKRRKVHLNACINGEWGREALIKHKWRNGDEFDIRVRCHEDEFELFIDHKLCARFAHYVPLSTISHIYINGGIELYSVSW

SEQ ID NO: 163617 - protein, 106 aa, Heterodera glycines
LHTTRLPRTPSRLCTAFRFPFAWLCQGESALCGPSWPHRTAAELAVHACRVSFVLMSVISQPIAVISVSHGQAKASRLAESIVTTQLLATTPSFAFPIVDAPHCHS

SEQ ID NO: 163618 - protein, 184 aa, Heterodera glycines
MSYNYPLKIVVVGDHNCGKSCILLRFSENSFRSDHVSTLGVDFKLKTIKIGRDKIRLELWYFNVLTLRMERYRTIYNSYYHSAHGVMCVYDLTNEKSFQNLENYWLRQVKEHAPQNAVLLMVGNKADLDSERKVDFDRAENLAKKIGVSIYEVSAKTGINCDDAFVELATVMRDRLLNSALNSD

SEQ ID NO: 163619 - protein, 232 aa, Heterodera glycines
MYIRELESPGELPLVWLNALSRSCFRPTKDDQLVSLVELRQAAERIAVENAQLNRVNAMLLILIQRPAGVLPHQAVPVAGAFGQQQNQQPANAFPIPPVVPVVPVNANNRLHTDELQLEISRHARTLNELSVEYARLMHTNRTLVEQLFAGGAPPYVHQQFEPVDALVNQNVFHVNPPAPNGNNNEAVDALVNQNVFHVNPPAPNGDNDGDDLQMFFEDDVVDAYLQNMDPN

SEQ ID NO: 163620 - protein, 212 aa, Heterodera glycines
LRFSNKMPKFSRKMLRPPRKRIAKKSDDKKSTEDEKKKKKKRRLPKTLKECFECVDVGSIVLCASYLDIPPEPISSSSDEKSNGKRKKQKGQTKKEGPKIVTDVHEFGCIPWRLSLVHQLRKDDNGGYSKHILKLALHSDYRKDVAWRADVSGTLTMKKWVDKMPEGTDPRKLDEHSERFATIFNQCCQTQAFGTEFPLPIGNSSAETANSV

SEQ ID NO: 163621 - protein, 196 aa, Heterodera glycines
MIDCHCHLADESFNEDISQVIDRAKQNGVKAALVVAEFKDDFERILELAHQFPDFIFPCLGMHPVQRGHISCSEEMYKNFEVDKWIRTHSDQLIAVGEVGLDFKPQHLKNGDADKEEQRKVFRAQIELAKELQLPLNVHSRSAGTPVIEWLAAHGAQNVLLHAFSGNVKNAQKGIEKGFFFSIPPSFTLSKEKRAI

SEQ ID NO: 163622 - protein, 169 aa, Heterodera glycines
VKEENDSQTEHGILELNNQNAEMRLELSRLRNELVFRRRHMLKSLYEVFFLPKLKRSSIAAPLVFRRQCFCSNFDAIRSLHFPSVPARLGHNDAELSSAAGFIVQLLLAISHILDIPLKHLLLFNGSRSAIFSRSSLERFGPLFHFLCKESKESAGPNDVPAQRRHRPT

SEQ ID NO: 163623 - protein, 184 aa, Heterodera glycines
  unsure (1)..(184): unsure at all Xaa locations
PRAEFGTRLGFAAAFDDHFQHFPWLFSALFAWLLLLFLLLELFPSFSANLSLQLVSPRRALIALFRAPNPTEHYLAFLDIFRIGAICWVISNHLGSEGRLDVLLGLPHGEHFKQSVHSLPIFGPIFGNSALGVEVFLVLSGFLAARSWHRRWQSDLGFWPNSLNFLLHRXLRLAPTTKAFVFLA

SEQ ID NO: 163624 - protein, 206 aa, Heterodera glycines
EKYPARNNLEHLAMLKCTEEPHIVRKTGIICTIGPVCRSVEMLVQMIENGMDVARMNFSHGDHEYHGGTIKNVREAAAKCTKKRNVAIALDTKGPEIRTGLLAGGGSAEILLEKDASIRLTTDSAFEKSGTAINLYVDYKNITKVVTKGSRVYIDDGLLSLIVEEIFDDAILCKVENGGKLGSRKGVNLPGTPVDLPAVSEKDIKD

SEQ ID NO: 163625 - protein, 117 aa, Heterodera glycines
KSLADNQSIFPLLICRRWWRPRISSKHHSSPCANGRRLCPTFSREVFQPFRHSTVQKSDWQTKREWIPWHMSLSPSSVGSAPLPSPTKRIRHIFHRVLLVRHHFLLQQKRIRHIFLR

SEQ ID NO: 163626 - protein, 200 aa, Heterodera glycines
  unsure (1)..(200): unsure at all Xaa locations
MPGICGGIVRKFSNSKNESKEDFCIENDNLEMMAELSEEDMDSSEEDENWKEINDEEQNTSAGQKGTQVSRRKRLKERLEQRKANEMRTVFVGNAPPTSTRRDITKIFRAFGKIEAVYQRTLLQMTEKLTKLMEGKDKTLKDRLKSTNFFVRFSSQEETENAACKMNGTHLGGNTIRVTTSNRRXFEHSLSIFLGNLPYS

SEQ ID NO: 163627 - protein, 281 aa, Heterodera glycines
MGNEHSNRSKGHPSSSSSKKDSPATRLQKALPSALKFGSNDLSSSALRRLLEQSKKSRSLQLKGAGIKRVPSGIVEEVHSLLRILELSSNKLRELPSTIGTFSMLKQLYIANNRLTNLPDEIGCLKTLELLDVSGNQLTELPDPLAACNSLTQMNASNNKFSTFPSVVTRLLRLEVIDLSENSITELPDEIAILRATELIIRRNQLALLNASNLTKCEHLKILRVEENCLPREAFTAELLEKSELTLITHEGNLFAEKEFQALPGYDAYEQRFTATRRRLF

SEQ ID NO: 163628 - protein, 206 aa, Heterodera glycines
EQKTKEHAMQSKQQPRELKAKETIIRKQFRQAVKIQTRQFKAYQSQMLQMAPREEHRELLNRLKEEQSRKIASLADQYEATIETMVTEQTIKLDAQQEEDLRQLTEKLNRELSMLTEYQEKQRVELSAQIERERVQLQDRVNLRLAVLKQKMNEEKVHFERNRERQLAQLHDRQAQALSAFSVDERRKKSSMGSDGGRNDASSTNL

SEQ ID NO: 163629 - protein, 89 aa, Heterodera glycines
FILLAIKMSENELGRTLDQCLADTALKILAGGSIGVVTALALFKGKRSWPVWLGTGVGIGMGFNNCQNQLKRDTAKTMAQKSAKNGQMR

SEQ ID NO: 163630 - protein, 246 aa, Heterodera glycines
DEPWMPAEKVYTIKGRGTVITGKLEQGTLKKNDKVTIVGLGKKLDTTIAGLETFRKTVDQAEPGDQLGVLLKGLGPKDVRRGSVLLKQGQDAHFTDKVRAQIYLLKPEEGGSKMPLAHMFKEHMFSLTWDSAATVMLQGRDFVMPGETVELEFLFNTPQFVRPQQRFTLRHDKTTIACGVFLEALPESEGEIRDKKWRKMQMRGVMERVGFNPFGNRSFERACKPDYTNSPKDNPAEALFKAEAKA

SEQ ID NO: 163631 - protein, 165 aa, Heterodera glycines
KRKKMLFYDHHTRTCCFFNVQKCAFTFALIGFVLNLVALVPIFLPYSPTSQEKPSIYIGKCLHILFSAMLFLSIMLAYKLRKAWLYTPYLIYTGISLALAVFGCLTYLYFLITDPQSLLDDNWRKAHPGKATNDSEARAIASAWLALMLVYLLFSGWIYSVIYRA

SEQ ID NO: 163632 - protein, 85 aa, Heterodera glycines
RGSTIKYLRIPDEVPDLVKDEVKEVRRQQKDNQRMKKQFAKGTKGAGGPSAGGGRPQQGGRPGGGPSRGAYRGGAHPSGGQPRRN

SEQ ID NO: 163633 - protein, 281 aa, Heterodera glycines
YRFVAYTTVSFSIISLLSVCLTLPMLKSYVSNVGMKMDSELSSCQHNAKDIWSEVSQLKGMPLLVAGNRTARSAYGSCQECCSGGAQGQPGQPGQPGRPGNPGAPGSPGQPGQTPQTPCEQVHPPPCTPCPGGQPGNNGPPGPPGAPGAPGQPGTGGGQPQPGEPGPPGPNGQPGQPGQPGAPGQPGQPASPPPTEPAPAGPPGEAGAPGQPGQPGAPGQPGAAGQPGPKGPPGGPGQPGNGGAPGQPGQPGQPGNPGERGICPKYCAVDGGVFFEDGTRR

SEQ ID NO: 163634 - protein, 70 aa, Heterodera glycines
RGTHFLAGSIFFSALTVSWVLWDNRNQQHKRTSSVRSILASAQRQKNMEEYLEQQKLYEEYKMSVSDGHN

SEQ ID NO: 163635 - protein, 187 aa, Heterodera glycines
MQPQSKRKIQVSFLIRNGSVESKHRGFVNALQFDPTTRSLFSAGSDSVIRQWDTSAPSGSAAFLRSLEHHCDWVNDKRQIVTRDSDGNVELWDVMQCGRVNTFPMGTNMEEVIKDNVRKVWIPSWFGVDAKCGVLEITLDESDAFSAWVSARDAGFTDKANDAKVNYGGLLLRSLFEHWPHAYVGDD

SEQ ID NO: 163636 - protein, 182 aa, Heterodera glycines
RQFCPITSDHHYSCVFNFFIILSPVSIPLSPTITKTPPKSLFLHYFCVANVPSDGAVFFYTNNSTSNSSNTEEQLLTLIIFKEYIRKKQHQFWNGTTARKRKTTANEEATSNRTEDQRKERETKEQVIRTLDQHQQQQNEQQNGDKRLRLLTKQKHKHRQVQQQNNNNRRRSYCLLLRLIRQ

SEQ ID NO: 163637 - protein, 190 aa, Heterodera glycines
MTKFVCVLLLLFAWTLQIVHPSVVPSDQIYIIEFNRDNSNNQQDNDLKSANGVEDSKMTNGVISQDSAQVVTTNGTTELETDPLTVSVELQRGGRAVGNQFNINFTDISYVLVCSARFRISLPSDTTLRSHSKMTAVPNTSDQFTLPNGVHLYPGLSHTAEVILSGNGQPEVTILDTLTVLTTEKCPNDV

SEQ ID NO: 163638 - protein, 191 aa, Heterodera glycines
MICPNESKPDTANGEQHKNSAAMNGHGFVPSGNAETEGKADKRHQQQRKLYKADENPPFLLTFLFGFQQVMVSLSVLVSIPFLISDEACPGRDRDQLRVRLIAATFVTCGIGTILQTAFGMRLALLQGVAFAYIPSIKAFMSMDQFRCNATIDDFVPPKVYEDKMAIIQGTLMASSSITFLIGATGMVGKM

SEQ ID NO: 163639 - protein, 124 aa, Heterodera glycines
MKTALELAKKIACGVFIAHVFRQKVGRILTGVGDSMLPTIHDGDILWARVWDPNDALRPGDVVCLVDPLDAEEYVIKRISAVHKDCIEVRGDNAKKSLDSRKYGPVPAGLVRYRVSLRLLPLNR

SEQ ID NO: 163640 - protein, 186 aa, Heterodera glycines
TKALVTTHSLITQMLCFATSKCFPQSFDQYKSRSNPLIFIFLLTIHLLLAEIASEKSSKETFKDSLVQNSPKSDLNFLFQQRSTQKTAFIRHHYASSVANGQSGQHSRHRRRIPTGIIGKLIAKLSGKTGKIAATASKSDDIFVGTAKVGRIPNRGTAPGRFYKSRGFEPPPFVSYAAPAGSEVAK

SEQ ID NO: 163641 - protein, 168 aa, Heterodera glycines
MARTKQTARKTQSQKGFSSSSGSQHMQSQLHNLRKQLATKRPNPKRGIGYKELPPVKIAQKRHHKKGALALKEIRKYQKSVNLLIPRRPFMRLVREVTQDMSQSTDLRWQGLALLAIQEAAELYLVSLFDDTNLCAIHASRVTIMPKDMQLVRKIRGETFLKPLSSQY

SEQ ID NO: 163642 - protein, 51 aa, Heterodera glycines
TAVKSGETKDISRGFSFSNGSGLHSPRADDQLTFFIHILLYYLFIIKGSTF

SEQ ID NO: 163643 - protein, 142 aa, Heterodera glycines
FFFFFFFFLNKYLFCKIKNSANSSNKRKTKKATRITKTATAIDQWVGHRSHGSATARTFLEMFKHQCFCVQNPTDTIGNARLSPSVQFTRKTRIGDAKVETSIIHFQNLFLQSLLLNFCLELLDKMVELMVTAGHFHDAITK

SEQ ID NO: 163644 - protein, 66 aa, Heterodera glycines
FDIITSLVSISFLNTDIWAHIFSFCRGTIPSHSRMNSHKSAQCKSPASDCHNLAHIRCNSFGPAPH

SEQ ID NO: 163645 - protein, 70 aa, Heterodera glycines
RSREPNSELAQRVILRLKRQDGVLLSSDGPYGNILKFKPPLCFGEDDLRKAVNALDKALAEFTTEEEKTK

SEQ ID NO: 163646 - protein, 194 aa, Heterodera glycines
MVVEKNTSSSTSATDSSPDGGNYIKEEMLQREVFCECLGGERVSVRASLMFQSQTFANMWKSLNVDTNELPDDFVFPMTSVAVPVFKKIINWMESHVGQQVPEFEEDPNTRERKWFVQTDFEKDFFKVEVEELVDFLNASNFLNLQSLYRHSCQAMAALLKDRSPEEIRDLLGIEDDLTEEHKAEIRPQNVWCN

SEQ ID NO: 163647 - protein, 142 aa, Heterodera glycines
MFNNHANHFMPNFCIPPPPPPQLPQPLNSARVFFPPVPHHHHPAYYLQPQHAHPHMNPQFFNLSVPPPQITQNISSLIAANINNYPTRHPLNGTHQITTSERFSKTFHTGHANGFTSKGNGAPLSRSRKRFLEQITNEEGWI

SEQ ID NO: 163648 - protein, 158 aa, Heterodera glycines
MSTQQQQRKTRSPIVLERGVSGRVKWFDFWKGYGFITRDDGGQDVFLHASSIVRKVQMHFVLIEGQKLEFDIIDGEKGREAAVVSGPGGIRVGTAIRYNPQQQLAAGKDFKRINASAGGSRLPPRPPVAKKTTKKMANSKCDDHNEPKVDNNEEQQEH

SEQ ID NO: 163649 - protein, 69 aa, Heterodera glycines
IIYGMFCSSFRSLFNSSSDLPFSSVVSPLPLRSVLNSVTLWPYPSIIASTMNLISRPNALIVSALSLSS

SEQ ID NO: 163650 - protein, 86 aa, Heterodera glycines
FKSKKFKLSADYSDLVFFEFGILILCPFFHCKTCQNEGCLNSLPHSTAALSFPAADTVPPFVAVVAGDGVIGGLSVFFASLFGLAT

SEQ ID NO: 163651 - protein, 22 aa, Heterodera glycines
SKPSFIQIKMCQSMLTNAKMKI

SEQ ID NO: 163652 - protein, 196 aa, Heterodera glycines
MTQESTMICVDNSEWMRNGDLPPTRFNCQQEAVRVLIQLKLRSNPENAVGLLSLADRIDVLNSLTTEDRKLLVRLHSLEILGVSKVFDGIKTAYLALKHRKNRNHRQRIVVFVGSPLDPLLAEKEMFMKFAKKLKKEKVSVDFVLFGEATAENNKIIADFVDILNGTEEGGASHLLVVPVGDTKLYDALLRSPICA

SEQ ID NO: 163653 - protein, 72 aa, Heterodera glycines
CSSRLSVQISHQSPFHRQIRRQIHRRRSHNAFAEVEHFQFDCPLLAWQLLMKGKWQLSAALREWWTQKTFSV

SEQ ID NO: 163654 - protein, 321 aa, Heterodera glycines
MPFLTLNAMRSLCRLPPSLFSNGIMQIRFVHHHKELEEPGGFERFMGWRRSNPAKANRNTHINERYMRRLRGAKRLIIDLEEDYAERRQLDQMRPDEVRMYLLRKGKPNIFKDVAPRDWNEHQITLNTFGQAIDPYIPPETSLFSRGAKDIFPDLKAFATRKYQGIFYGLRRIRKKDGFQNFNLKDFTKLAEQIYANAYNALALRDKTKLHELITEAAFSKMWPDVEKGTLHWKLVQFSEPSKVLTVRCLDNPTKSGNDIAQIIVRMHSTQILALYDKDGHLLLDSEEEPRQCLEYVVFENHVASVDGMWRLHCRIYPNWL

SEQ ID NO: 163655 - protein, 194 aa, Heterodera glycines
KFEHIFKISFQLFVPMTFFKEVDYLSLRLDDPVSALADYLPNSIIYTINYSLALPPNLVLLYMGLRPSLITSRVKFPTLGMTCANLFGLFGFLLLNIVYLYTVFSDVRLSLFMCSLLRTVFYNTTYVCYFLFPVLAVDQYLYVCQNVELSIRSLKAVIGVCFAIPMIVAVYDLWLQKVILYDFMFAYIRMSPYT

SEQ ID NO: 163656 - protein, 412 aa, Heterodera glycines
PTRLRRFAICVGVDEENGTCLMVYENDLNAIEVRMVFSGVQIGKWYRFDLAKGTRRNWEVAEERLPTRIMPRGDAGSGGTRGDRIQLCLPIFFVPNFKCFGCTWRVTSPTSFNDKMHFNFVSPRLEAPGKINFSEERLAELNIRPGEQCFAFLTLDCQGPGPSIKPPQWTLDAVEHFHRVNVDPLAPSVLSVSLGASKEWGILLDLVIESEDERNGMGFILCLRDGKFAFGRILKTEGHNDSCWRANVGDTVGFSLIDVDCFNYPVRLALNVIAWQSPAFTSVDSDVLADQFPQESLPEFPSVRLISKSTGKMAQHLFELCFPIDDSQMSCLRMGSLKVDRLGVLIDLNGDLLSAWSNMKRKGTDAISSLLLARVRARFSSLPDQQQPLWMVAEMLEIAKMRVDTESKRQTL

SEQ ID NO: 163657 - protein, 148 aa, Heterodera glycines
MEVKLKPYSDPSRWVAIYPLYIDASKSLAQGRRIAKAKAVNNPTCQEIFDVLNHAGLRCELEQKKTHPRAQSRGAANPKQQQQEEGRIRVQLKGDDGENVSEGAAQPKFMTRQQMMEYAAEMVPKLKTRQQQTQVEQNDATGKQKKRK

SEQ ID NO: 163658 - protein, 197 aa, Heterodera glycines
MASNSNAQLLDACEKGAELKNIKSLIERGANVNFADKDGLSPLMGACVFGNVEIAHCLVELGATIEQKDDEGLTALGHAVIAGQLESVKMLTGKNANCLVFAKDNRSPMVIACQEGRMEILSHFRSVGVNLNHCDEHGITPLMVATQKKRVDVVCFLLQNGADKSQTDAKGRTALAFADDLRDSKERNQLLKLLSDR

SEQ ID NO: 163659 - protein, 127 aa, Heterodera glycines
HDLEGLFARLKELGIKIAICTADSRAGTTRVLKTRKVEQFEDLIVCGDDKGSVPKPQPDNALFICRQLGVDPKNAMVIGDTPADLGMGRSAKLGSIAGVLAGIGEHKELNEADHLVEHVGELLPLIG

SEQ ID NO: 163660 - protein, 274 aa, Heterodera glycines
MMAAQRILGALGQIGVGLTAAGVLAQAALYNVDAGQRAVIFDRFTGVKPNVTGEGTHFLIPWVQRPIMFDIRSTPRAVNTITGSKDLQNVSITLRILHRPDPSKLPQIYLNIGTDYAERVLPSITNEILKAVVAQFDAHEMITQRESVSHRVSVELAERAKQFGFILDDISITHLSFGREFTEAVEMKQVAQQEAEKARYLVEKAEQMKLAAITTAEGDAQASKLLAQAFSQVGDGLIELRKLEAAEEIAELLSTSKNVSYLPKDISPLLALPQ

SEQ ID NO: 163661 - protein, 220 aa, Heterodera glycines
EFSGTVCADCGASCPSWASLNHGVLICSDCCFVHRNLGRHFSQVRSLTKGVWHDKQLALLQLLCRNGANNVWEHSLIDSLGGAGRAKKKPVSNDPIIPKKEAFITAKYAQLAFAIRPAKDEFNVDDLNRQLWSCVRTAHVETALRLLALGACPNYADTEKGNTPLHVAAKEGQNLQAELLWLYGADIGQRNGAGQTPAELAKTEGFNELAERLVELEYEM

SEQ ID NO: 163662 - protein, 150 aa, Heterodera glycines
MAAIEKPQIVQQPVQVFGRKKTATAVAFAKKGKGLIKVNGRPLEFIQPEILRIKLQEPILIVGKDKFAGIDIRIRVKGGGHVAQIYAVRQALAKSVVAFYQKNVDEQSKKELKEQFVAYDRNLLVADPRRHEPKKFGGPGARARYQKSYR

SEQ ID NO: 163663 - protein, 215 aa, Heterodera glycines
ELKFCGMSNDKKDESSISTNTLVNKEKASIVQESSFVTPGIFRRRKMLTGRQLNDEGNNEAKEKSADFKWSIDQIAKIQPIEFDETEEFSLPPENWDPCAKFKTPQFENIDHFWTHNNLIAPSPGLFATASALRRVQPSANSPTTSPFQLALSPFGSGPSCSSKCSLSDSTFMSPTMMLTHSQMSESTKAKMFTAKEELTTTSTGNGDTKENMIA

SEQ ID NO: 163664 - protein, 143 aa, Heterodera glycines
MNFSPITLFLLSSLAIFYAAVAFRQQTVAVRGRLMCGDKPLTDTKVKLWNKNKIGRDDQLADVKTDAQGNFALDGGVGSIFGMNVHLKIYHDCDRGILPCQRKVNLGIPGEYVTRTSTVQRWLDAGTMNMQLKFHDESTSCIN

SEQ ID NO: 163665 - protein, 82 aa, Heterodera glycines
IFISILKKKFKMKSLTQITPIILPIFLLLLVLSPPNAIGQDLCQWDSGKCFDRGCPYGCPYDTEPECGCTSPKHDAGKKQTN

SEQ ID NO: 163666 - protein, 204 aa, Heterodera glycines
  unsure (1)..(204): unsure at all Xaa locations
MVISQIAKTLWSHXKKSIFAVIATAYGANALRARLRDDRIRYSFAERARKYGLVSFGPAQRLRRVTVLVNRESGGRRAADLFKRNALPLLNLAGLQVNVVEVSSASELESLCRVLDNSEADCIFLVGGDGTLSRALVGLSQNSAPLPIGLFPGGRKNIAFWRIFQSKNQNRDSMDLNDQDSKSVPMFCESAMALIEGENRLVYP

SEQ ID NO: 163667 - protein, 119 aa, Heterodera glycines
QYFAQERTDVQTKQIFLAICRSFVSPAVPLTVPLSEDRQGNIYVSWDVLSFDGIRRSFAGALAWQKSQFEAFLTIICLIASSTLSQDVLQTASELRRKLRLIDEFFADPFSYAQERQKR

SEQ ID NO: 163668 - protein, 249 aa, Heterodera glycines
SPPVTPIIKSSASLKFWSKFFDTRLNWHCRRNSTAKVVPKKVLRDNCYQSTSLDSGLRIATLPAYGQFTTIGVAIYAGSRNEVHYPPGTAHFLEKISFLSSQQFPDKAHTLDLLEKFGALIDCQSTRDTFVYAASCRVENAFDVLSIIADAVLRPNILDNEVEYCRDVIRYENETLSRQPECEPLLTDWIHQAAFRSNTVGLSRYCPNKLVDVVNSGHILSFLSQYYTSPRIVLASVGVDQQFLVDSGK

SEQ ID NO: 163669 - protein, 209 aa, Heterodera glycines
MHPYEFKLDAILSRSELPVEKLEKHAWNPEDRSLNLYVKEEDVLTMHRHPVAQSTDGMRGKVGYTRGFHVWQLNWPVNQRGTHAVVGVATKDAPLHAPGYVSLIGADAEGFGWNIVENKCYHDAQNTKPWSFPYEQPFVAPEKLFCVLDMDEGQLAFATDSKYLGVAFRGLKGKKLYPAVSAVWGHCEITLRYLGGLNPDSHLMDTCRR

SEQ ID NO: 163670 - protein, 116 aa, Heterodera glycines
MKWTYKEENSFDKRRAEGEKIRRKYPDRIPVIVEKSPNSRLRDLDKKKYLVPAELTIGQFYFLIRKRIHLRPEESLFFFINSVIPQTMTTMGQLYQDRHEEDLFMYIAYSEENVYG

SEQ ID NO: 163671 - protein, 120 aa, Heterodera glycines
MFQKNTAFFLLFIAFFLGIASARLKRGSYGYNPPPTPLPLPQPCGQYNQYGSGGAFGGGGGGSYSQPNCNTYGQQNNYGQSNYGGQSNYGQQESAGGFGGIGGSPSQFGVGAPGCGGASC

SEQ ID NO: 163672 - protein, 35 aa, Heterodera glycines
FFFFFFFHSIRVSYQNVVDYADTNKVFVQNIEITF

SEQ ID NO: 163673 - protein, 163 aa, Heterodera glycines
MLSPFSYDPFYRRSLWPMATHVGNVLSPFRQLERELDHFFEGMQPMLRDHAAQLNVTDKGELTYKVDVSGFRPEEINVEVIGNEIIVNGEHREQNDSESVHRQFSRRVLIPEGIQKESIKCELDGGRLFICGMKTAGKGGRTIPIEMKKKAAVDQQKEEEKQQ

SEQ ID NO: 163674 - protein, 211 aa, Heterodera glycines
PNSYVFPFLFLYFKFTANFLELLHTMSAIENDETKSRIWQQLKTKLHSTMVAFGSGSVQLPKLMDTFRHDWGSELTSYAVQLGFGCNDAAVYKMLLTMPDEIESGFISATGTFAFKVIPKAETSENLTKIDQSNQYQDEMRRIFARRRSSMSSGFHRSFPFNQSFHVRPPVRMPPPPPPMPFNLSAPILNGPKFPGLVIQLPNCADAQRRV

SEQ ID NO: 163675 - protein, 187 aa, Heterodera glycines
MTNKTALIIASDGSEDIELIVTSDVLRRAGINVTIAGLQDRAQIELARKAKLQVDALFKDVLDKQYDAVVLPGGQPGSDNLAADPRVGTVLRAHEKAGAIVAAICAAPIAFVAHQIGVGGVLTSYPSVQKTITDAGYAYSDQHKVCVHKNVVTSRGPGTAFDFALKLVELLVNIGKADEIRGAMLLD

SEQ ID NO: 163676 - protein, 178 aa, Heterodera glycines
VMLNDTKLESTLSTTIKSIDLQIELPKCLDCLADGLNVTEEAITENGGGTIRFLRSSPPVSVPILPPYILLLHDQTNDANVWRKTLQILSASGFCCVAPHLSNFVFDEEENVNFLLNLTSHIGAREVVLVASSMSGIYLIPFLSRGIKKKDIHFHVKAFIAIGVSDTHRLKVEELVNN

SEQ ID NO: 163677 - protein, 117 aa, Heterodera glycines
HILTNKNKTGDFSNIECNQRFFLRACSNFLPVTPCRTFVETAESVVSANWNTFPLATGGAAPNWKGPLAAGGTVVVNENPPPKGIGFDSDCPWIPPFVNFGGCHASGTMFTRPVSVC

SEQ ID NO: 163678 - protein, 260 aa, Heterodera glycines
SMSWFIIIILLIFFIFLLVVFFSLPKSLPFDPSGKHCLITGGSRGIGKAIGAELLLRGCRALSVFARDPIALATARKELEALCRQPGQTVHTFQVDLAADGPAKIEEIVREAERQSGAVDLLVNNAGTCVQGAFDELPSDAFERQLRTNFLGAVYVTRSVVGGMKRRRFGHISFVCSAAGQLAIWGYSAYSPSKFALRGFANALHMELLPWNVGVSILFPPNTATDGFRDELRTMPPQIRAISGTAGLFQASDVAARLVQ

SEQ ID NO: 163679 - protein, 81 aa, Heterodera glycines
GMAIASDYKKLHAKSTKCQKIKLSKMEQKLFGQKPVEIIGKTQHNGIVWYIVQLEKKNAILLNHDFVIKKYPQLLLKSYGL

SEQ ID NO: 163680 - protein, 83 aa, Heterodera glycines
QSRPSGKINHEILMEETRRIPILGEVVGQLRNIYGSSLAEQFKNELIIASQLNRGPMNNGISNPHMDMLLGVDEKISDLLHQL

SEQ ID NO: 163681 - protein, 96 aa, Heterodera glycines
SLCIININKQHQNTAFVSIRGIRSKVTSQLLDIPLNHVTFVLQTLDFSVNFSHPSAEKSVTGKLYFHTGTTNSHVALFIYRHFLILIKYCNFVNVG

SEQ ID NO: 163682 - protein, 235 aa, Heterodera glycines
MSHRKFSAPRHGSMGFTPKKRAKRHRGKVKAFPKDDPKKPIHLTAFIAYKAGMSHIVRDVDKLGSKVHKKEVVEAVTILETPPMVIVGVVGYIETPRGPRPLKTVFAEHLSEDCKRRFYKNWYKCKKKAFTKYAKKWQDEAGQKSIEADLNKIKKYCSYVRVIAHTQMKLMKHRNKKAHIMEIQINGGTVAEKMDWAREHLEKQGPRGAVCELATPSTASVSQRKGLKGVTSGWH

SEQ ID NO: 163683 - protein, 212 aa, Heterodera glycines
MAFIGYGALTAALSGIILYANLPTRLTIGAIVPTVEFLAETQLKKLEPGQAVAGPQIKASDLFNAGHPLLVMAVRRPGCAFCRKQASALCSAASTRFADKGVRVVGVVHEQHGVDQFRPFLPCADAIYLDEEKRFFGPSQRWLPLWMGFLRLSTYVNYYKAWKAGFAGNTEGEGRLLRGVYLVNGDNMLFAHLEKQWGDEVKMDKLVDAVSK

SEQ ID NO: 163684 - protein, 84 aa, Heterodera glycines
MASSGFSVYVGNIPYNATEADIGNLFSQCGVVTNVRIVYDRETNRPKGFGFCEFQDQQGAQNAVTNLNGAELNGRALRVNWTNK

SEQ ID NO: 163685 - protein, 198 aa, Heterodera glycines
MAKENKTGEQQSKRKKCRRSNSPSDEFHRPMEVPDHIYVAGMPRHRAKSETKPEMFVPSRITVAGGNTTVASKAQPVEILRERQTLLQPSDNENNVMNGIPEMLTANELTHEDSTNNASEIMAAQGNETTSIVVDKDPLKELKMMRRRLIQLTKRVSELETQNAQNANERTLLLGIVSASTLLSVVLLASQIRTWLSR

SEQ ID NO: 163686 - protein, 119 aa, Heterodera glycines
SYQFITLSTPSFAAFFSVLISAWGKAQTDAEQVEDGHTKLPARTISIACACRTTAAPVFKLSSSTTADRRFSFKFQHISSLGRAEGERSQKQAAENDRKKLGNHFCKLNFRKRANKIIK

SEQ ID NO: 163687 - protein, 244 aa, Heterodera glycines
  unsure (1)..(244): unsure at all Xaa locations
FVRHFCSQNITKPTTKCDEQENSSAPSCSSSSAALVHVQNRGQWPVEVLAKFLADCFVLGDFVSEYLXTQMLDEVGPHMKRMRWEDEHWDGQIQRYREREQMLENWLPENQALIRRIWHTSFPAPFEPSPYVHILDLHQDGFISPHLDKSRYCGRVISGLSLLSASVMRMRHKSAELGQLCVADLLLSRLSLYWLSGSARYDFTHALLGAEESRFGTQTVPRERRIALICREVVVPTAKSDQID

SEQ ID NO: 163688 - protein, 208 aa, Heterodera glycines
PRAEFGTRVKMSELNPLNISDSLFATHLSSQHSPTFFGTSQFQPFPSRELIATSYANAFNYHSIEQQRSIDSHNLTTFSPSCCWEGHHRPLPPSNTLAINATECHANPHECADENELEIGCGGLSVLSVSHDGTDNSFFISGTSADSLSPRESGGDVHRRPFNNILNSNNTPPLNSATSKGFRTELEKQRYLERRSRNNEAAKQSRNK

SEQ ID NO: 163689 - protein, 222 aa, Heterodera glycines
MASKIKPLICPSILNADLSDLANECRKLMAAGADYLHLDIMDGHFVPNLTFGHPLIECLRNKLGNDAKLDVHMMVSNPSKWLDPLHKAGIDQFTFHWEALGEDEAVDTLIDRVKSKGIRCGLSIKPMTPLDKLMKFCEKIDTALIMTVEPGFGGQKFMQDQMEKVRQLRKAYPNLDIQVDGGVGLDNIEHCANAGANMIVSGTGIVRSADPRQTMPKMKETV

SEQ ID NO: 163690 - protein, 165 aa, Heterodera glycines
TLINPMEKRLNPSALPTLMLSNFGGYSVETLCTLGKEFVLELMTRMISIVSTLKMDIKGDNKKDLDIVRIQLDYSRLIFLCLTEVRLRIDLKLAEGIGENQNLKDVRPSDERLLELLSEPNQPEENAKKANLAERFEQNRKELIRLNCHLKKLDWLSVNAENGDK

SEQ ID NO: 163691 - protein, 76 aa, Heterodera glycines
MVCVPCIILPVVLAIYLRFVQPYILRFMPQRWRIWFDSVLYPTCPVNKMETTNKSKTENNKTDGEGETGKECEKDK

SEQ ID NO: 163692 - protein, 177 aa, Heterodera glycines
MHTVDLSQRFIDSLPSSFFLGEHATYKDHAAISLLNLAHNHFVTVPPLVAQFINLISLDISNNHLALLPKEISSLKNLRELSLRNNLLENLPKEFQRLQCLRELNISGNLLEHFPRELLQIKSLRVLYLGANRLQSFPSDICRLSNLQVLYLGGNALVDVPDTIGQLSELTSLGLAD

SEQ ID NO: 163693 - protein, 162 aa, Heterodera glycines
MSKMGRMESDTDPNTVTILRKHQAPQRVLKSDADVNAAKKRGDDVETTKKYFAGVNRQHKTDKNTAVLDAETEQLHHERVSLKLGTVIQQARQAKEWTQKELATRANEKVEVIREYENGKAVPNQSILTKMERCLGVKLRGKELGQPLAPASTAKPTTTAKK

SEQ ID NO: 163694 - protein, 197 aa, Heterodera glycines
SFSPVQIFNDEASEERAENARLSSFIGAIAVGDLVKSTLGPKGMDKILQSMSTGEIMVTNDGATILKSIWLDNPAAKVLVNLSKVQDDEVGDGTTSVCVFGSELLREAEKLVNQKIHPQVIIEGYRIASAAALKALEAAAVDNGSNPEKFRQDLINIAKTTLSSKVLSQDRVYFAQLAADPVLKLNGPTHLGTLHNI

SEQ ID NO: 163695 - protein, 164 aa, Heterodera glycines
MMWMFFHTQIKDTVLFKWWKVETIGSLLITCLVMYFGAICFEAIKWLRLMLEQKSRQPNSANSAGLNMTDQNKTVPMTNRRYAESLLSRVHLLQSVLFTVQLLLSYLLMLCFMTFSVWIGMAICAGAATGFWLFGRRVPMLAFASSGAAGSGQGYASTGRTELH

SEQ ID NO: 163696 - protein, 255 aa, Heterodera glycines
MDSQLLATNDHSNGETAATLEEIYRKALEYWNSVGSDLNGMLGGFQQLHRPDINDSINFLCELRKKSFLRHFDRALDCGCGIGRVTKHLLLPAFRSVDMVDFSDHLIAQSHIFVPSSSNPTENNSVGQRFVESLHTFAPAEKGGDYDMIWIQWVTGQLEDNHLVDFLRRCKESVLRRDGCIVVKDNVAKGTEKEFDEVDNSWARPREMLHKLFERADCRIVLERKQPNIPKALYEVRTFALKPLSNDETNGMNDD

SEQ ID NO: 163697 - protein, 188 aa, Heterodera glycines
MKLFLLFSLFLIQFSSAIDNMEHLMPENDADSLISYLEFQRWHKAVMGAEPRESSILFGKNDKDADGMLTVAEFVPLAFELSRKPPERQTDKIFKKFDVNSDEQLDRQELLKGDSISEEIVDGLFQVADVNNDGRISFDEFSTVANTLESRLSKDEKNAGMAMSLLAQLDTDKDEPINGTELFEYAHK

SEQ ID NO: 163698 - protein, 183 aa, Heterodera glycines
DRDGNPITADDLCVAGALAVLMKDTVKPNLMQTLEGTPVFVHSGPFANIAHGNSSILADQVALKLVGSDGFVITEAGFGADIGMEKFFNIKCRTSGLWPNAVVIVATVRALKMHGGGPPVVPGNPLPFEYLNPNLELVAKGCDTNLRKQIENAQLFGVPVLICVNKFGTDSDDELGLVVDKPR

SEQ ID NO: 163699 - protein, 35 aa, Heterodera glycines
ISRTHCQLDEMKFNCTAFIMLSKVNFQINVHCSLI

SEQ ID NO: 163700 - protein, 105 aa, Heterodera glycines
SVSFFLTNNLCCVIEQMSTVTNGKAESSMGRYVYILPYLPTVIPSYFFYKTAQSARKWAPVHKFGPFKVSAAHGFALLIPMPHLVILALQIWYTRLSRRINEKNK

SEQ ID NO: 163701 - protein, 88 aa, Heterodera glycines
QSYQMFYAVVQLIGTKKEAENFVYKLELSNNRRRLCWEASPRSIHEGVAAAISQSDCLAFDTNHANFFAENGNLGINVTIQRAEGINR

SEQ ID NO: 163702 - protein, 125 aa, Heterodera glycines
HLLDQFVAPALRLWMVIDLVSSVLLVMIVIKKCFVRIRIPRTKRQIELRAAKRRKRKALKESGGGDGGESQESEHNQYRGGQTIVLNSFNGANGGNGMRRSGNGANGGAERAAQRQTIASRSIPV

SEQ ID NO: 163703 - protein, 352 aa, Heterodera glycines
MVDCPQQNGHRQQLPLFNASEHFFEGAEKLFEIWFDNDQQKRENGHKSTLRTIPENELRQLLNTAGCHILQVLRTAEIDAYLLSESSMFISDRRLILKTCGQTRPLLVIGKLLELARKHCQMDTVTNVYYSRKNFFRPHLQPQLHATFDEEVDYLDGFFQGGSAFCMGPLKHDRWYLYTLTTPRAPLNCSDHTLELQMTGIPVELLSVYSKSACPGGAAECTRRSGILSLLPRGTIVQDELFEPVGYSMNGVPAGDEYVTIHVTPEPEFCYASFETNHRRGCLYEQTLRVLDCFRQPGRFILTLFANEHSNGAIEVQQRLWAEDFPGYRRLSVQMLRLQANWGGGEGEKSFN

SEQ ID NO: 163704 - protein, 201 aa, Heterodera glycines
MTTIAANGGGETFSRKVFVGGLPLDIAQQTELELSRAFRQFGELQIEWPTKRVNQGKTTLDGKPAGPGYAFIVFADPRSVGLLLSKCRREVTAPGEKTRRYFLTLSSRTVHNKPVQVRPWRHSDAVFTPRSGLPVNIRWTVFIGGLPRPTRAIDLYQVLMPPIRGGVGRDCIVHVDIDVDSEMRYPKGAARICFSRYDAFV

SEQ ID NO: 163705 - protein, 304 aa, Heterodera glycines
  unsure (1)..(304): unsure at all Xaa locations
MAEENTNQSEGLDFFLNRSGWTDAQLEEVIRLLYGKRLQQLSIAQRFLDSAQEANFELKGFQMVAQEEQCRRPKKMRVAAIQNKIVLSTSAPVQAQRDALHQRVGKMIDAAARAGAQIVCLQEAWTMPFAFCTRERLPWTEFGEXAEDGATTKFLSELAKRLGGVKIAPILERDIHKDDLLWNTAVIISQTGAVIGKTRKNHIPRVGDFNESTYYMESTLGHPVFETAFGAKIAVNICYGRHHPQNWMMYALNGVLLLMLPNALVSSPPTVXGADIIFNPSATVSGLSEALWPIEARNAAIANH

SEQ ID NO: 163706 - protein, 161 aa, Heterodera glycines
MPAPLAVQQKMISEDGSDANIPQQHFSANGTPQQPPSATVPPAAAAAHLLKNSLSAPLLANLPPVPPQCGPPTVSLALLIDFAIHWNYRQFEILSELNSKKKETDRKISVVEFAHNTRLIFVRLLAIVRWLKSAKKFEPLASIRHLLDEQATRYVETADRL

SEQ ID NO: 163707 - protein, 180 aa, Heterodera glycines
DNHRKLIRVTAPPPQRQQQQLINGVVMSHNQHLHVPNTAIGGRTTTVDMAIPQRQQLSDSEVLPVHHHCLYRIDHPQILSSGTATDFSVLQNFPAAKPRNAVNLNNNNMQQFVPTTESFSSPSSSSAPNTAIELTLMNGELSMDSSATISQFHPIVLDNSPTKTLPEDVRNAYEQMLKEN

SEQ ID NO: 163708 - protein, 114 aa, Heterodera glycines
MKQSMPTTTKWPSRACLCMSPSRSVVLPSLSHCPFRRPRCCCCRYFCCPSPLSILCSLCRSFSAFFSSHPPSHCSLSSSAVVPMPFGVGDRSLLRPNETAEVKRTSWSRTNVDR

SEQ ID NO: 163709 - protein, 199 aa, Heterodera glycines
IEMDLFDIFEHINTNEDVQFLRSSGNAGALAPQPLVPNTVYSLSDLCSAFSSAASLSAPPMGMASNSDAFGLRSTILPAAPLSAPPVGISTNSDDFGLRSTIVPAAPLSAPPMGISSNIDNTGATRERNHQYFFGHDFTTESFSSNSGTTRIRKPQPLNFSLKVFLGGIPANMTTNGLELNFARFGKSIIDWPKKTGNK

SEQ ID NO: 163710 - protein, 125 aa, Heterodera glycines
GNERFRCPEALFQPSFHSMESAGIHETSYNSIMKCDIDIRKDLYANTVLSGGSTMYPGIADRMQKEITALAPSTMKIKIIAPPERKYSVWIGGSILASLSTFQQMWISKSEYDESGPSIVHRKCF

SEQ ID NO: 163711 - protein, 98 aa, Heterodera glycines
TVWTLTDLVFILRKMCFLPSNSTVFGRSIGFIHQFGRRFLFPPIAQCEHVAGLKMDKMLQLQCRFCFFTRRNGRWIVECTKFGRHRTILRDFNADLYW

SEQ ID NO: 163712 - protein, 159 aa, Heterodera glycines
MDVDGAAQDEMVTDGPGYIANCPTGSMAQQSSNNGGGSSTSSSSGGGNGAGGNSAVGSSHQQYRSMSPLSGLGMAAASSASGTSSTSSSSSSSSSSVIPLDIGLGMLPIAENWCNTQVKVVKFNYMWTINNFSFCREEMGEVLKSSTFSAGPNDKLKWC

SEQ ID NO: 163713 - protein, 158 aa, Heterodera glycines
KMKLGICISWGRTGGRLMVPPSNEPIRPFTLIWNKTDGLVALLGQKLEKGTWVLFTLSTRTAFLHSVDRKLVDRVSITDQRRETAVDSMNIQVMAFVRSFRRYNDYYRIGMDQLIGWVLVSEDSFVRRVVLQENLAAQMSIIFKHDCVRGFNWVAVSV

SEQ ID NO: 163714 - protein, 266 aa, Heterodera glycines
MKVEKIKTRRGKKFLEDRAPKLVENDKVTLFVKGKKCSVMLNKILGELYQLKKPLANRLQRNNDSHPFEDDSLLCRFSHKFDASLFVFGSSTKKRPNSLLFGRMYDHQMLDMVELQVENFVSSDEFKQVKSVTLGSKPCIILQGHLFESNGILQRIGNLMVDLFRGPKVEYLRLQGTELIISLTAVSEERIKFRVYRASLKKDMESATPKIELVEMGPNIDFKIDRTKLASDSLFKTALRKPQEVQKSAKKNVKFDAFGNKVAQVH

SEQ ID NO: 163715 - protein, 320 aa, Heterodera glycines
  unsure (1)..(320): unsure at all Xaa locations
MRSHQFNLRQLRKPFRNVASTNSEGLRHRNSIVGPPGVPWTSLALLATAPPIVAPEDDILNSLFAQVGGMPTLKSTGTTVELVRRRSFSYGSNCAKCGKPLRRTPTTNDNSKLLYCKDCNIIFSSSSSNDASSKKFNILKNGPIQSPPYPTEISAYLDKYVVGQQQAKKALSVGIYQHYKRLENNQRFLNQFFDNNFPNVASVQQQHHQQQSQMHPNISIHYPFSHPHDLATDLXLCDCTSMTQAGYVGEDVESVLQKLLQNAQGNVEKAQRGIVFLDEIDKIAATREAISHAYRDVSGEGVQHALLKMVEGAVVNVKTG

SEQ ID NO: 163716 - protein, 140 aa, Heterodera glycines
MHSLAFISFAFCLSLTDAFRTQSSGVRGTLLCGGKALADTKVKLYDHDKGPDADDLMGTTTTDEQGRFQVSGKTTELTTIDVQLRIYHDCDDGMMPCQRKVTFNIPDSYVTSGAVPAKFFDIGTVNMQIIFDHEERSCIH

SEQ ID NO: 163717 - protein, 154 aa, Heterodera glycines
MCKKTKSEPCCKKQVVELRNDIATNGCIAGGIECCDLTAHTVQRRPQTTGQLFLEELYFVKHVDNNSLADSPREREILAEYRNLLYSIILNGLRQWSKSGVLAQITNGEQFEHALKLLEGKEGIPTVADEERKRKFLDDSKCSLVNALDELFNL

SEQ ID NO: 163718 - protein, 176 aa, Heterodera glycines
MECPPGSSFDPSPSPSVASQPFSEECHSPDNQISLDNSVPEESPNGNANVCMGEAKPRWGPTHAGAKQLASMYGKGKRLQEVTCICVASALFLSVGCSLLYHFRLVPVGQLILASLPRVLMADFNSGVVHWGADTWGTVDTFVGRNYNRSFREHHVDSTAITRHDLVEVNGDNFML

SEQ ID NO: 163719 - protein, 118 aa, Heterodera glycines
MGSLLEYSMEGGGGAMDGSAYIDMESWSNVLSACGVDNHEMRERYHQVRLRSRSQNGKYTYTLTTRTFEDADGKKLPQPVETRKQLDRREYQSYLKLRDRSRQSIHKKRVCFVLFTIS

SEQ ID NO: 163720 - protein, 316 aa, Heterodera glycines
MDSQLSAAETSVDSVCHQLVLRSANWQISPKLEQSIYWNVDRIFVDLNWSQNRSCPNPEVIQVQHTPMPSKEKAIEYLRHILDNSFRIRRLDLNIQVSTELVVNDILDVLNGHAKVQLEELFVRRRYVGSKFSGLVPLIRSNAKTLKQIGKIGLGEAIKALSDEIHLERLSLINFDLVEQDQRLDSEELAQNSRFYIRRLAGIGTTFDHLSYTCFTGFEITKMPALNMLRQCKVKSLRLTMQSGVAIKDPELPRPLLPMMQRIQLVGGMDASSERLSLLFPALEELEIEKQDLITGHRLEKRARVLSNYAPDFVGD

SEQ ID NO: 163721 - protein, 177 aa, Heterodera glycines
KGPKSQKNETEKPPQQKQPQEKPGAQQDDTETEEDSKEDKRKPIKCQEERKCYAHSECGARSKCKPATLDRKKKVGTCDCGVCGGFQLLLLCSLNSGALSLDKNIVPRECAGLKDACVEKPLFVGSKSKKCDCEVGFQKAGFKNLRDGQKKVCNKQKCDGKKDTCFGMNCYGGKCRC

SEQ ID NO: 163722 - protein, 106 aa, Heterodera glycines
PFTDNRIHLKHKGRLDHHHHCIGSILSLWTRTSVIVILVTSLPLSGYLLVVSCIHLYKSGSRYFASSGGTSTPASSLAGGSSTGDALIPMVVAGAQVLGSIGNFIN

SEQ ID NO: 163723 - protein, 135 aa, Heterodera glycines
DPEPEADDDAEPEPLSEVSGVPEVSSVVSVVSSVVSSVVADFSPPVSAAASSFFSSAADPPSSFFSSSALSPPSSSFCCSSTTRSDGTATTSPAAEGGVSFLSSSAPFSTSPSAPPLPSSSSSSPSAFFGFMNRR

SEQ ID NO: 163724 - protein, 102 aa, Heterodera glycines; identical to SEQ ID NO: 162191

SEQ ID NO: 163725 - protein, 36 aa, Heterodera glycines
RLGFMENVRKSIPVNVGTYFLPFFHFLTISIKECIP

SEQ ID NO: 163726 - protein, 189 aa, Heterodera glycines
PFKQFIYIFFLQISWCHGVSTDLMQIDEQQQQQMAAANECCFIYPFPASGLSSRQLMRVLSAWLMPSFSADEEGPSMNVPSCFSDIDSSFECASFSVPMVFSHDEWFVQCVPALGEQLDKLLLLSQHQRDRGRKLMPPTTTEYGRRRGVSCATGAAPFARVDHPNSDADTAQDRNATVHCGFRHFAPLV

SEQ ID NO: 163727 - protein, 188 aa, Heterodera glycines
MYVERQFVRIVAVITMGGSSLRSIRRISSFYPSLSVNRPQRFSYVVQMSSDSNNVRHGVALLCWHCGGDSMTPSDDNAGTVLLCSRCGRLQPLPARIDFFSYFGLDDPAGATIGEAELKRRFRRMQSLVHPDKFAGRDENERALAEQHSAFLNNAYRTLREPFARAEYLLTLLETLKNDDGTSPGTAS

SEQ ID NO: 163728 - protein, 182 aa, Heterodera glycines
MEMELSSIFLGRFSFSDLVEFSENLFIYCSRFMFTPFSSTGSVGNGDQIHFNSDGMSSGRIADRNYKQRLFGLFLCYSLYFLQPSQYVVPISVTSSQLDDFYEFTSSVLLPEENFEALYCFYRLLNANAFSIAPVLGNFNPLLQGTFHPTLLDKSSSESSGIELVQDFGLLFSLSNSEVLKQ

SEQ ID NO: 163729 - protein, 222 aa, Heterodera glycines
MFLKRRISEPSDEDEKQRTNQIPIDNNSCVDGIPLNIQSLRKTYVDREEPFLLEKDMLSCPFDQFSIWFGNAITQTDLKYEEVNGFALSTVSRNGRPSSRMLLLKGFSKVGGFVFFTHSNSKKGKELSENPYVSALFYWPKVNRQIRIEGRVEILGEEVADVYWSKRPIESRIGSKLSDQSSVIPNREHLTRKQRELEELCSVNGEEAITRPSDWLSYSLPP

SEQ ID NO: 163730 - protein, 208 aa, Heterodera glycines
MAQSQNGGVKNRRISLGSPKDLKEVHFFEEDEVPDVPLNGARVKVCYAGVCLTDKEISNTKQARITHGVKDTSLFPGYEVSGVIDEFGPNATPVEYNLKVGDKVIVWPTEEMCQNGYADFVAVPNLSLLVKIPDTLSMHVASILPAGATWALSAIVHARPVVEAIASTKGCCNILIVGAGGLGLWILTLAKHFLTAGQENRIKLIGAD

SEQ ID NO: 163731 - protein, 157 aa, Heterodera glycines
MAAKELFLAQQPDLFKPIQSINAVLILICLGSSTAVPGIGVLWFIGLCSLIVSVTATEFVYSSVLTLLCGVGFWLSFGFASHVPDNGHSAGYIFAGIFLVAQVACYAIPVLIIYDRSRTDGPAAAGHEQIANVHPFGVTTDGCEQHYQSMQHERPIV

SEQ ID NO: 163732 - protein, 212 aa, Heterodera glycines
MVKLQRIPAEFGIECNVYGKCEFFNAGGSVKDRIALRMLEIAEQSGRLRAGMTVIEPTSGNTGIGLALACAVKGYHCVIVMPERMSREKELTLKALGAKIVRTKDKARYDSEQSHIGMAFKLRKETPNSVVLDQYKNIANPLTHFEGTAAEILDALDGKVDMVVVGVGTGGTITGISRRIKKANPNCIIVGVDPIGSILGGEDEHAGHKYNV

SEQ ID NO: 163733 - protein, 370 aa, Heterodera glycines
MTKKTAETVVAKKETKPKELNEMQLQRLNLIKKIKEKKAVAKEKRERERNEKQMQRLEFIRRMTELRHLNPLASPSRGPFLYEGDYFYREILVGRSDSNANNGEAEVDCVSVSAPGGFDELFVTNPAENSAISISKMICGRKKALNNKEEDGGTYSEESFKNLGVEAREFLGSFLKFIDDQRLVDLATQGVTGGASMFHSLTMKNANCLRESLRLYCKSGQALLVQVHFWLLKHLSQTRLTSYLNLLRFLKNAGSNLSDYIASSPTAEAELEKANKTISEFIAQKLYEPPLSSSSKFIECDPIKNVSLVLVYPQINAKMSQHTIRAHETLFRNLLPLAVCCVEKVELNLNVDRPISVEECAWMCIQMIRQ

SEQ ID NO: 163734 - protein, 116 aa, Heterodera glycines
VMAAVIISMGFSVDIPAHVSYHFHIAKWTEDGQRQRTIEERIRMSFASVGFPAVQASTCTNICILCLLVVPVYPAQVFVRILCTCITLCTIHSLCLLPALFNLLGTLEAFLSSKFA

SEQ ID NO: 163735 - protein, 209 aa, Heterodera glycines
MTSPFHSLVESQREFFRTGKTAELAHRRQQLKKLRKTILDNSEFLCEAVQKDLKRDAKLNYPLEISSVIIEIEYVLDNLERWTAPLNVEKTFTTLLDSPQIVREPKGVVLLIGPWNYPLNTLLMPLVDVLAAGNTAILKPSEVASNTAAAVDEIISKAFDRNYLAVVQGGVEQTGELLKEKFDHIVFTGSALVARHISRAAAEHLTPCT

SEQ ID NO: 163736 - protein, 186 aa, Heterodera glycines
ALCPLGSLLLILLLALLLWCPHWLWSVPPYASSSHSSVPSPFFPALYAAFHRTAWATLLLLLAILLDASRGNALNSFFCWRCFHPLSKLVFPVLLLSEPIALSLFSSLHRPVHSTPLSTVLAWIGILVCSLIVALLIDTALTRPIRWICGAREETNDAVNTSSSNRMKNGRMIMEMEGEGKKRTLG

SEQ ID NO: 163737 - protein, 190 aa, Heterodera glycines
  unsure (1)..(190): unsure at all Xaa locations
PTPSWRHCGWPVHSSRHLHGRPGRVSSSVPGPRTVAELPKSFLEQHHLTVAFKVLKVHRSAIHLAICSNPIKPIKLYWQWNERVMGVYWRQGNRKKRLXPEISQMCDRGNVTVEKSQLLFVLFVAFNLCLWLQHRLSMKSEQDGNRIINAEKWAVSIVRCVHWSVRAIILRLNASNSLVSNHLPNQSPMQ

SEQ ID NO: 163738 - protein, 211 aa, Heterodera glycines
  unsure (1)..(211): unsure at all Xaa locations
MHIINNSIWLKFLITAFLFKIACSKFGSSENKGFFFYFGYGSNLLEERIHVQVKGATFVAIGALKGYRLAFVDFEEPNRWHSAAATIEQKQGSLVWGCIWKVPNSFADELDKQETKYKRIDVTVFPRPSTNERFNLNMRLFSNFVIKCRTYQYERPDMKYGLPSPQYKHVIVTGAEEHGLPTXYIQWLRENFEDNGYDGPVELNLXALETM

SEQ ID NO: 163739 - protein, 91 aa, Heterodera glycines
LISSQKSCQLKTAKKAEFSKFFISIFFYSSKFSVISSRLIEPVKSFRMISRLFDSVNNFKSYIDSKLAGRSWPVPRSAVLVFQIFQRFLFF

SEQ ID NO: 163740 - protein, 208 aa, Heterodera glycines
  unsure (1)..(208): unsure at all Xaa locations
QSSSRSFRPSDDTDSRGSCSSLLICFSYCSSIICFPCAICLSIRVIQQYERAVIFRLGKVMREAAGPGLIFILPCIDDFRCIDMRTTSFDVPPQEVLSKDSVSVTVDAVIYFRVFDANKAVVNVENATMSTQLLGQTTLRNILGTKTLSELLSKRDQINFEMQQVLDKLTDAWGVKVERVDVKDVRLPKDMQRSMAAXAEAAREARAK

SEQ ID NO: 163741 - protein, 269 aa, Heterodera glycines
MVERRKESPKRRRRSSSSSSSGSSSSTGSSSSGSSSSSSTTASRSPSPKKQRAAARPSARDDRTTRRSPRRSRSPHRVQPKTEKSTVSSRRSPSPRRRRPSPPSRGPRRRSRSPRHERAAPSPPPVKRERTPEPPPRRLCVRNLSRNITKAHMEEIFALFGALKSCELPMDRVHVHLPRGYGYVEYEKAEDAEKALKHMDGGQIDGLEIQCEMTFPFKGTGGGRGHSPVGINSMGIGIKRERSRSPARRFAARLSPPRRGRRSRSPTPM

SEQ ID NO: 163742 - protein, 183 aa, Heterodera glycines
SARGFGKFSEHFLFLSLGRLACFDDCVITETYPRKQHTTHQGLHGHTNGDADHDFVVVPVFVVIVVNQISGAENQRENGQSGDDRIRNLVRSVKGEETIEHRRKGPAEQKAASEHEVDESDHVILPNGRVQEEDEDQHQKGQNCSDQLNRPNRHHSDGVVVYTTTSRPSGCCAHDSGRHFGTE

SEQ ID NO: 163743 - protein, 139 aa, Heterodera glycines
MNNNDMQLLMNRFKEASQRGSNDEVERFFSDLRKTPHMFNAFLKLTKKQGVCISGDPFPHQHQPQGGAATQPQQQHFVQPQSSFYQPNQPQQNGGNIPSSQFGGPFQQQMPSHGAGTAQWMQPPNQSQQQSAASQRNSS

SEQ ID NO: 163744 - protein, 233 aa, Heterodera glycines
  unsure (1)..(233): unsure at all Xaa locations
MTNVLNSPMLEGIKDSGRHFVSGGIAGMAEVCFAHPFDCMKTRLQIGQFHGILDCARRTLLNEGPSGFYKGLLPPLVIETPKRALKFMAFDRYWRVLRSDALPTWLVIESXSMSGLFTGLTEAVLVCPFEVVKVRLQSELNTPFFQQKSSATVAREIVHSNGWGTEGLYRGIGANLWRHGVWNSCYFGIYHNLRLFLCSIPSKNSQSSADRLETASLTMRLTIASLSAIVANL

SEQ ID NO: 163745 - protein, 200 aa, Heterodera glycines
  unsure (1)..(200): unsure at all Xaa locations
ETPGPPGPSTETPGPESSTSTPSEGPGTPSTETPGPPGPSTETPGPPGPSTETPGPPGPSTETPGPPGPSTETPGPPGPSTETPGPPGPSTETPGPESSTSTPSEGPGTPSTETPGPSTEAPGPSTETPGPPGPSTETPGPPXPSTETPGPESSTSTPSEGPGTPSTETPGPPGPSTETPGPPGPSTETPGPESSTSTPS

SEQ ID NO: 163746 - protein, 147 aa, Heterodera glycines
LPRRITKETQRLLQDPVPGISAVPDEANARYFHVIIAGPDESPFAGGVFKLELFLPEEYPMAAPKVRFMTKIYHPNIDKLGRICLDILKDKWSPALQIRTVLLSIQALLSAPNPDDPLATDVAEQWKNSETEAIQTAKQWTRLYAHA

SEQ ID NO: 163747 - protein, 91 aa, Heterodera glycines
  unsure (1)..(91): unsure at all Xaa locations
ISLLATFHHTTMPNPPIRLIDHALPSVATXRHGDGGVRXXDEGDDVGTVVQIQLLLRVVRHFGCQLLRPLHLLVQSRLFVFNYQSQLCAGL

SEQ ID NO: 163748 - protein, 109 aa, Heterodera glycines
RSSLVGSGEGDAVDGVTSKWKPNRGSWSSSGDDKLRFNVPLDPIDCCCCCCCWSLLPLYFSLVSSPSRFFSGFSSSVENSVIRFAFGPSLSPEFFSLCFSLSNDENLSE

SEQ ID NO: 163749 - protein, 204 aa, Heterodera glycines
MSSQQPKLYYFAGVRGRGEYIRQILKFAKVPFEEVSINIEDWPKYKEEMPLGQIPVLEVNGVKFSQSLAISRYLGETYGLSFNDPLERALLNMIVDQISDTQNSGAFKEWPMVRLDLVPCGDKAAFFREKIRPQLDGCASLVEKYLVEKGDGILLGKDKITWADIYAAEFFAKCIHFGEKDCLEAYPQIKSLIARVQNEPIIKE

SEQ ID NO: 163750 - protein, 196 aa, Heterodera glycines
  unsure (1)..(196): unsure at all Xaa locations
MLSRRSLPIFFFRRSRASNFPVFCYSTENGAQMLESDTSGEQLQLLRTIVDSHLTNGQTFFVPWSDKRALQSILLPFKELANQGVALEFIIDACSKKXSALFMALTKNGRETTKKLGVFVDCMEMTYEDAMRFYAKWASGLEEVSADCVQQRLSIFLGRGVRAGAQMRSVVMRCPEILFMGVPXQMDMFWENILDF

SEQ ID NO: 163751 - protein, 229 aa, Heterodera glycines
MSNLNFEDNLQRVQVEIQWKQCLYNPIVAPFADVGSYPIFTDEFKGTRKCTLDVYVQGNLEHLDDKVVFLTVHDVGKTYLSCVDLANSPTLSPLVGQRAVFLHVSVPGQAPGAENFVGDFPSMEQLGDGLSQVMEQFNLSKCIAIGESAGADIVCRFAMSFPQLVVGAVLVHCISTTHGIIASIKELFTNLLLNDGEMTHSAWNWLLVHKFGNHEMDKEKRNYVDAIKA

SEQ ID NO: 163752 - protein, 214 aa, Heterodera glycines
MLSRSPEMEEERLPIVSMVIVADKSRAPANFITLTKTYDDGSDADLWKDGFGFGLFNRSVRYIAVSRHIAETPPSGLEVLTDVAVISDKEAVPSSFVCLDFTVDTKERALKKKYLCARFTPRTDAIDAVTNLIVLARSRRPPKGYTLAGDIDGMDIWFRVSIIPESYGRLTHSQSTELQHFFTGASPKGVGIYPNIAPPLGTTAQNRHSTTDLD

SEQ ID NO: 163753 - protein, 153 aa, Heterodera glycines
MAELITKLCTTKLAILKWLQMLCAVITVLFLIDGQRQSWFYTLVFVVSIVFGLISLLTLIANFFLHSRNQSVPLPAFEIGFNALAAFVCLAFAVLLTIDSVRMFGDDFSHHRFLPPANIGKDGWRNRTLVVAIVQMVDAICYGLSLHRVRQRM

SEQ ID NO: 163754 - protein, 223 aa, Heterodera glycines
MVNILADLVALGDVEKRALDFLPRAARGYYESGADDEQTLRENREAFRNFLIRPFALRDVSQLDPSVTVRLSPSTANPKCRPFARTFACPIGIAPSAFHRMAHDEGEIATVKAAGETGTLMICSTLSTVPLEKVAEAAPEGSTLWFQLYIYKDRTLTEKIVRRAEKAGFAALVLTVDAPLFGRRRADERNAFQLPGHLNIANFASHMEQSTLSGAEVGSSGLS

SEQ ID NO: 163755 - protein, 210 aa, Heterodera glycines
HSSVDKGIMLSGVKMRKLPTNREKGGNFVLRAEVLEAAIKEDKANGLTPFILVVTVGTTNTCAVESCRELGPICNREGIWMHVDAAYAGSFFICDEFRHLSDGVELADSFNFNAHKALMINFDCSPMWFKNGDEAIAFFNVDPVYLKHEHQRDAYDFRHLQVALGRRFRALKIWFVFRAIGIQRIQDFLRMQNKFGKLFADLLLGDDRFE

SEQ ID NO: 163756 - protein, 227 aa, Heterodera glycines
MGPAALLLLLPSLLLLFLLIRALLELIPVSRLDKRSVLITGCDSGFGFDLALRCLGAGMRVFAGCLTQTGIQSLKKSAQEKGIAVELLEPIELDVTSDESVAKALEFVERKLGPGKGLHALVNNAGISGNESWDDWLIPKDYEDVFQVNTLGTIRVTHAFKRLVKRERESRIVIMASSCGRVALPTLGPYSVSKFPVEAYPDIIRTELILFGVKVAVIEPGFFRTPI

SEQ ID NO: 163757 - protein, 161 aa, Heterodera glycines
MFGRFVSSLFSSTVSSVFRPERFLQKFSPNFCCHSNFLRQFSFTAQNHYDDILMRDIRRGSPPKHARKPHDRKPIKGTAFRKGIVIKVVVKHPKKPNSGNRQCVLVRLSTGRQCIAYIPGEGHNLQEHSQIYVRGGRRRDLIGVRANVMRGKLDCAAVKKK

SEQ ID NO: 163758 - protein, 123 aa, Heterodera glycines
GFDVSEMDQTPVEDRSVELCSDDDETKRKVETDSEDYFMVEKQLRERRVGIQNFSSMVLFDRKAKQRQKMAEKRRKERNNAKLILYGRPRKTKQCSSVFSKEDFAQIGKKDGSSANERIKRIR

SEQ ID NO: 163759 - protein, 204 aa, Heterodera glycines
EALAQSVASSKHTNSKMARKSRQEQQRRSQSREQQENIPPCCAQMRHENELLRRALRKERERRMFTTNAYRQLLEQFNHLVDFRRVVVANGGGERSEQLQQCQSSPSSVNGASVPLSSEAETALAMAPTATAAAVTPSITAPVVNNQHKQIITEQPAALNQHHHPNWYFVALERDANNTRGNSSNNDSAELLRDERVWRMFARS

SEQ ID NO: 163760 - protein, 181 aa, Heterodera glycines
MLETPRTIPGFHSAGPRRLSLATSHYRQFGIVSSPLATSSPSPMLFSSAAAATLPDRLPLRRPKKPPQKLPLLMPQLHLQFPSSRTNTIRSTDLSSIYTVQPEEAALDERNAHLLQCIQMQQELINQATAAIALCHKKFRFSGTLQELSAQRLLLVSQERLALLNRQMDQLNEQRILTNLS

SEQ ID NO: 163761 - protein, 339 aa, Heterodera glycines
MPSEYGIETDSVTLQRFVLNEQKKFPDATGDLTTLLTSLLTAVKAISSAVRKAGLAQLYGVAGNVNVQGEDVKKLDVLSNELMINMLKSSYTVSTLVSEENEQVIEVEVSGTQGKYIVTFDPLDGSSNIDCLVSIGTIFGIFRKASNTSTKEEDTLQTGRKMVAAGYALYGSATMVVLSTPGRVDGFTLDPSIGEFILTNPAMRVPKKGKIYSINEGYAKKWSKGITEYIRSRKFPEEGKSAYGQRYVGSMVADVHRTLLYGGIFMYPATTDAPNGKLRLLYECNPMAFVMENAGGKAHSGKCPILDIQPKSIHQRAPIFLGSKEDVEELLEYIRKHDQ

SEQ ID NO: 163762 - protein, 316 aa, Heterodera glycines
MATACKLEMSLDEIIKANKSKTNQASINGRKTQMTGKRLIRGNIAKGKPFIRKQINGQNQTKKFGLKRVGINVRRGRPLRKSNRVVVMRKNFAAKNRAVISATKNLVNKLVKKALNKSNVSPRGKRFIANSARRVRTIILNKVSPRSRVITRQRQRIVAVQPQQQPVFVQRVVRGRGPIRYASDAALVPQTMKMVPKRRFRINPMQQQQPVLLVQNQSPKRRLPSFSSMSVRQHVNALRRATTVQQLQTQFVNQQLPIRQQFRGRQAITTPVVPNRSRGKQQFILDQPVQAGPQFMKFSPRRQRRQTASTNTSSFN

SEQ ID NO: 163763 - protein, 296 aa, Heterodera glycines
MEADFHAPWFYGSLSREKTEKCLQSCADGTFLIRNSTNYPGDFTLCVACNLRVEHYRIYMVNDHFTCDKEELFDTLTQLVSHYKRDADGLCHRLVCPYISEECQRQRTHIDLVLVEERKKEFEQAALLLSVDHLRLGTVIGHGEFGDVLSGTYRGRKVAVKTLKNGMVQDLLAEARFMIGLHHEKLVFLVGVVIEDPRESEVYMLTEFMANGNLVDFLRSRGRHHVDRPRLVQFAQDVAEGMAFLESRNFVHRDLAARNVLLDDRLGAHIGDLRTPSIGQSARKKSRGKGKFPDQW

SEQ ID NO: 163764 - protein, 62 aa, Heterodera glycines
MAKSKNHTSHNQNRKDHRNGIHKPKKERYMSMKGVDPKFLRNLRFAKKHNKRNVKASTESAK

SEQ ID NO: 163765 - protein, 46 aa, Heterodera glycines
TFSYIHLTDAKYETELTRVEFLNIHWSCIESINFEPLSSFFVENHT

SEQ ID NO: 163766 - protein, 218 aa, Heterodera glycines
PGPSTETPGPPGPSTQTPGPESSTSTPSEGPGTPSTETPGPSTEAPGPPGPSTETPGPSGPSTETPGPSGPSTETPGPPGPSTAGTSSTKTYTVPTTPKPPPCCYGCDYPVDCHTSGKDCDYSPLQPPYQSDPYPVGKCVFKNVTCAAPNTGKVLFMKLNNDPNSVVSSSVSPFNKVTVILQCTCKPYFAPYWVQVGVDGNPAKQVNVKSATCGRHCY

SEQ ID NO: 163767 - protein, 135 aa, Heterodera glycines
ISRLVIPVVRIARASRGAPDIPNSENIDRDAVAGLVKSVAEGWCCHLAEKNTLALFIPSKLFSSTLSRENFVDLLEYCEEHLKVRRILACFNKSDINPCQGIPRALRCIGFTLLPPERYPAGIDKNTIFAMVYKI

SEQ ID NO: 163768 - protein, 189 aa, Heterodera glycines
  unsure (1)..(189): unsure at all Xaa locations
SSSSPFPNCRCFLILFSVCCCCSLFCPFSNGENVYCTYYRDSNEITCGTVTCETHSPFTPDNSELDGLDTKLPRGWYRIGTLSIRHDRAXFNLYRRRATGLGYWDFYTQIPERNCIGQFGLHAGENIAGSVAVKDKRCFDRLVVQIGAQXRPTEKFDVLQCRKRVFNSCWLGSHTLHDQHTYLTNLQSY

SEQ ID NO: 163769 - protein, 219 aa, Heterodera glycines
EILQMHFCARQLFIPNVSAIPLANAFRSVHRISFCLPSLFGKTPNRPTHFLSGMPLSSDSKNVRLVEESAQPMEWTADELALKEKATAENAWTPIYRYRGFVGVWFILRFNLVFLIFSLASLPLSISQHIPISPSIGLILFSSLVFAGIKKYFTRIVAVISVDTASRSIYRIGYPSVFATRRSRFARFLDVQPLSTNSDSVRGVARLRFTDGAKDDFLL

SEQ ID NO: 163770 - protein, 170 aa, Heterodera glycines
ALVVLGDKCRNQLAREYRDAIKLTYSQLGKTVPSFLEASIIADEILAIKDLPANPKINVVYNKFLSVIAYEPTHMHTISYADLKAAPKLATYEMEGDILSNLHQFMFATSVHWAMNEGHAAEFAARRSAMDNATKNAGEMVDRLTLLYNRQRQASITNDLVDIITGASAL

SEQ ID NO: 163771 - protein, 146 aa, Heterodera glycines
MSDETILNATDSDWPFSKSETRNSTVAVLPQKVLVTGGCGFIGSNFINYIFEKWPKASFVNLDKLAFGASPDHIIDDISFSPRYVFVHGSLLDENLVKTVLNEHRIDTVIHFAAITHVDESYTDRIGTIQENVIATTTLLEAINFY

SEQ ID NO: 163772 - protein, 126 aa, Heterodera glycines; identical to SEQ ID NO: 160953

SEQ ID NO: 163773 - protein, 88 aa, Heterodera glycines
MTKGTPSFGKRHTKAHTLCKRCGRRAFHNQKKTCAQCGYPSAKLRSFNWSEKAKRRKTTGTGRMRHLKNVNRRFGNGFRSGTPKAASA

SEQ ID NO: 163774 - protein, 205 aa, Heterodera glycines
MGPFSLFPFVSLFLSAVLFVPSAVSELVSLTVGVSAFSALGLFIGDFGGLYTLTKCKFYECCDAPWINRDIAMRLEPDVDERLYGQHIAQNTVVRALKAHLAKSNPNKALVMSFHGWTGSGKNYLAKMIAKAIYKKEMRSQFVHQFVATHHFPNADEVDKYKGQLRTWIRTNLTNCERSLFIFDEMDKMPMQVLDAIVPFIDFYD

SEQ ID NO: 163775 - protein, 75 aa, Heterodera glycines
NQKMKSLTQITSIILPMCFLLLLLSPPNAIGQNLCQWEGKCVDYGCPTACTSECVCASLEKFVNASNLAPGKQTD

SEQ ID NO: 163776 - protein, 243 aa, Heterodera glycines
MLTSKFSERIKSLQPLFIICGCTGTGKSDLGIELAKHFNGEVINADSMQIYKGLDIATNKVTTEEMQGVTHHLMSFCDPCESNYNVHHYRNAVLPLIERLWANGKLPIIVGGTGYYMEAAIYYDNLVQTNAQKSDDLRNELLQKFPTCDLLHEELKRVDPISAGEVHKNAKFKVLRALEIFYSTGQTKSEHHKMQREGQAANFHLAGRLHTKSTLLFTLDADKEVLSQRLNSRVDDMLKRGLI

SEQ ID NO: 163777 - protein, 212 aa, Heterodera glycines
MMSSSSFEQLSCEIAELEKLRQQSQLPNVQKAIDELIGRWKVKKEEQKMKTDKGTAETLSAPTEAPKLISGSVHVRPTKKLTTYAFDESDKFVKLYYSLPGISDSVPGTISTDFRENSFSIVCSDVKGIDYEIRVQGLCQAVEPEKCVVKQKSGDQLLIMLKKAKERQNWGSLLKLEKEVGKSKAKTMDKESDPQEGLMNMMKQMYDDGDDE

SEQ ID NO: 163778 - protein, 270 aa, Heterodera glycines
RKYFFKTYFYFILTIFSSMSTNRGRGRVSLPSGDHSQTSEYGGRGRGMYSFHQQDVKESSQIAGRGRGTTLQQKTEHGGGYSMGMQQQQEISPMRGPRGGRGHDVSGHGLDRHPVAPTMPSPVPFGGVSAVQPTSGRGQLPSMSRYGAYAAFTKQRDQMDQQKAVLEEVATRLEEHKGDETSVESQAEEVTSTTLQRGLLQHEVGGMEAQQMVVGEQAQCPSAEGVPHAFLCAGCQFRADCANLLRAIGALLKDFGSAASVDGGRNNGTT

SEQ ID NO: 163779 - protein, 187 aa, Heterodera glycines
MTLTMDELRNKVQNGQISTVVVGSVDLHGRLIGKRLTARHFVEMAQKKDKMSMCYYFLAMTIEGHVAEGFEVARWENGFGNGLLQLDFGTLCRTPWMEKTALIMADMHDHRDLPFFCAPRTILRRQLQKLSEKGFRAKFASELEFHLFSESQKSAREKQWRNLGTAQPHHRCMHLVGSSGDEPFMRR

SEQ ID NO: 163780 - protein, 161 aa, Heterodera glycines
PVVGGAVPPLPTAVSVVVLWCAVIITAAFRRPLTNGMYAVARTAFRKYSIASANWWPKARSACTVVVSLNSFRPMPWADVPLCSADNDATPSAVPSALLLGVSGSKRRNGLSKGERISGGPHSEWEEKSEEQTMPFTIRLPAVLVEQNAAIIVKSAEIQTA

SEQ ID NO: 163781 - protein, 148 aa, Heterodera glycines
MSTNDVKEAAASTVLPPSSSQSISMASSADGSPLREENFVHSLKSQVDGENIEEIIQSQKKALERFEKTNEMLATCSSLAEKRLDRARKDFAIGREKICRAKSDLDSIFRRIASFKQTLASNYPAEFVAAQTDSPHNQNSDCINEPNG

SEQ ID NO: 163782 - protein, 165 aa, Heterodera glycines
MSSRRNEYLDAKVLGFSTIIFRKTVKIYVGGLPEDATSEELDDAFHRFGRIRKIWVARRPPGFAFVEFEDARDAEDAVRALDGTRICGVKARVELSHGSGRGGGRGFRGGGGRYDDRYGRDRYDRDRDRRYRSRSRSRTPRRSRSRSPPLRERSRSPSYSRRSRS

SEQ ID NO: 163783 - protein, 82 aa, Heterodera glycines
MPLCPKCQRPVYFAERVTSIGKDWHRPCLQCHNSACKKTLTVGKHCEHDGKPYCERCYGALFGPRGYGHGGVESHVFLDGTT

SEQ ID NO: 163784 - protein, 206 aa, Heterodera glycines
MSKSSTSNTSYSSSSSSSGFLEAISGEENEQKLKKGEEETLATAAKPIDKVSRLLPPSPTAVPMAGLGEHPQLDNMVKAYESIISHVGEDVQRQGLLKTPVRAAKAMLYFTKGYDENFDDVLNEAVFDEDTDEMVIVRDIEMFSLCEHHLVPFLGKVHIGYLPNKKVLGLSKLARIVEMFSRRLPVQERLTKQIASAILQAVHPTG

SEQ ID NO: 163785 - protein, 163 aa, Heterodera glycines
  unsure (1)..(163): unsure at all Xaa locations
MAARSNTNKETLKNHSNIDKTIATKKLVVQDYKNRLKDRIKSXLNDNFECILGASKVNCDDATHRSNSAGKLGEHYAIRNEAIARAALLVKATNELKMLTNEIREFLTIRDFNFISNSISKAEEDFKKRLKQYENDYSALRMSISTMASEIDRELVENSLYRF

SEQ ID NO: 163786 - protein, 162 aa, Heterodera glycines
MCKKTKSEPCCKKLSSCFSEEMKGSQMFRQVVELRNDIATNGCIAGGVECCDLTAHTVQRRPQTTGQLFLEKLYFVKHVDNNSLADSPREREILAEYRNLLYSIILNGLRQWSKSGVLAQITNGEQFEHALKLLEGKEGIPTVADEERKRKFLDDSKCSLVN

SEQ ID NO: 163787 - protein, 278 aa, Heterodera glycines
MAAESQYPIPYRSKLTEPFEPGQTLIVKGKTAEDSVRFTINLHHTSADFSGNDVPLHISVRFDEGKIVFNTFSKGEWGKEERKSNPYKKGDDIDLRIRAHDSKFTVYADQKELKEFEHRVPLSHVTHFSIDGDVLITQIHWGGKYYPVPYESGITGDGFAPGKTLLIFGTPEKKGKRFHINLLKKNGDIALHLNPRFDEKAIIRNSLIANEWGNEEREGKIPLEKGIGFDLKVINEEYAFQIFINDERYCTYAHRVEPHDLHGLQIGGDVEITGIQIF

SEQ ID NO: 163788 - protein, 206 aa, Heterodera glycines
MSAANDVAATANDPSTVVCEEKKSSAAEEELIDVVTVGENNPTGSAGTKTGESDEVFVVEQIKNKRSVNGTDEYLIKWKGYDDEQDDTWEPLENLHCPELLKEFETNYCPAKTKRRKKSSGKVAKKRKISSDSTLPTIPLVLKDRYHIGEDGAVPEHIIGVMKHEESGKMMALLTYTDHREATEFVPTEILLENKLTAKMILNFYQ

SEQ ID NO: 163789 - protein, 438 aa, Heterodera glycines
LFKSLGKSLHRVNGYISNKSGFVDAWKLAKETLELWTEIQSSTLRNLNDLLKEVARYQEELARMRKRAKDADTLETINLMLTTTTCLQKARDTFNQRSTEVVSLKQSNKEWTAASTKEYLRARNKLNKAHEEYKQYMDKYSQIRDTFEERVNQAARSFQEHDRLHLLQMKSFFTQMAKCLENAHGANAQVSATLRQRVEQNINVEQMMFRFIEEKGTGTEPPQKLQWTNADELPPELDVVSCVQSQSSSSNSSAIVPNFSGNQLQSNANHLLGLNDSWLTVGGGKSIAAGGGESANSGGSIDGGFGESMCSLGVKRGSINGCSEQNKSAGESDSERHLELPFSANPSSSVLSNFSAQNPSSSYVPQQISSWLGRQKFSGRLKKHFSTSQSNLAGPMAIEPFAVGESDQQTKDELIGSASNFSKSCNDPSIKTNSSAGL

SEQ ID NO: 163790 - protein, 133 aa, Heterodera glycines
CVKKIEFPDEPVFFCSDRLARYEQSMLIETGHVYAQAARDNALAARNNSVTAQESARAVRDITDLMVKQLESKDRQIVDKDFQLAQKDVLLEEKDRLLRQKDEMIARLQGYINGLGVPLPAPAEQQQQGGGGQ

SEQ ID NO: 163791 - protein, 214 aa, Heterodera glycines
MRFAIAPSLCRRVLCRHCWPRLHFGRLLSSSASVPWHCPQSVTATTSTNSFRTCRYSSQAAAVAPENYEFQAEIDSLLGIVAKSLYSDQEVFIRELISNASDALEKRRCSELQGDAAEEMATLELRIEVDEKGKKLTFVDTGIGMSREELVNLLGTIAKSGSKAFRADEKNAAAAEAIIGQFGVGFYSAFVVSEKVSVTTRKLGEVMGHIWSWK

SEQ ID NO: 163792 - protein, 281 aa, Heterodera glycines
MSSGTVSPLRDVPLRLSDKPSLPFPSPRRLTNDCPSSPSPAPITLYLRLVSWVCSMGGLLFGYASSSINDLLPFIVREMRLGPAEVGVVISCFMVGAGIGGFVGGRLADRIGRKRSLVLFDALFIVFSVCTSLAPTFTFLVIARMFYGFTCGGISSSAPVLLAEISTIEFRSQSVSMSLLFIVFGELCVFIIGAVFGNIWYETVSIWRWINIAVVIPAVALLFCHAFLVPESPRWLAQNGQLQKCLDTLRRMRSDSLQTQKEFREIQQVVNGNSGRDNFGD

SEQ ID NO: 163793 - protein, 233 aa, Heterodera glycines
FLSSQLVAADHHPLILPALITFVILLVSSVFFFIYRRFRQKPNIILFVGLSGSGKTTLFTKLINSKNCWDSFISLKENQFDSYATDNGQTLTLLDFPGSDSFKKTLCRKWLNEKRNSLKGVVFVLDSATFNKKDAAELLYDVLFESGNAVPVLIACNKQDIGHAKSHSLIKKALENEFGLINVSREAALSSISGESEKRILTKSGKEFAWSELKNKKIDCLECTTPKDENLSL

SEQ ID NO: 163794 - protein, 197 aa, Heterodera glycines
  unsure (1)..(197): unsure at all Xaa locations
MRIWPSPFVPPSLPFALLLPFCFCVALLLRFGAGRDDAAVGELQHNRLHPPDTKEIQQCLSPDLEAEESTSGRFFAAVIDAGSTGTRLHLFEFSHELEQEPSAFKLEAEIYKEIKPGVSCFAKTPELAAENVRELLLTAKRQIPAELWAKTPIAFRATAGVRLLSEXEADAILSEIESEVLSRGLLVDDDAVGVLSG

SEQ ID NO: 163795 - protein, 296 aa, Heterodera glycines
MTFAFAVLLLLFIPPLTLAKNARAEGPVPVVLWHGMGDSCCNPYSMGFIRKLILTNMPHAYVLSLQLGSSVAEDIGRGYFANMNDEVAAVCQQLAEDARLANGYNAIGFSQGALFVRALAQRCPHPPIRNLISIGGPQQGIFGLPFCPGSFYVCSLIRRLLDNGAYTEFAQHNLVQAQYWHDPNLAEGYRRANIFLAHGNCERSCDSTYRDNMGKLRNFVLVGFSNDHKLVPKETAWFGFYADNDTQTIVPMEQTELYKQDRIGLKTLNESNRLHFLTFNGEHLQIPHDLFISEIV

SEQ ID NO: 163796 - protein, 148 aa, Heterodera glycines
RLFNMADNAPKKRTFRKFTYRGVDLEDLMDLTSEQLVELVHCRARRRFQRGLKRKPLTLIKKLRKARKECPENEKPAVVKTHLRNMIIVPEMIGSVVGVYNGKTFNQVEVRPEMVGHYLGEFSITYKPVKHGRPGIGATNSSRFVPLK

SEQ ID NO: 163797 - protein, 127 aa, Heterodera glycines
QAILAEEDRVVLIRFGHDWDPSCMRMDETLYKITNKAKNFADIYLDDISEVPDFNKMYELYDPVTAMFFFTNKHIMIDLGTGNNNKINWPMHDGQELIDIIETVYRGARKGRGLVISPKDYSTKYKY

SEQ ID NO: 163798 - protein, 177 aa, Heterodera glycines
LNGRAGFLASLLELRLLFGQQLLSDDEIRSVLDAMVSSGRKYSKKHKSPAQLMFEWYNTEYLGAAHGVSGIYQMMLSFWDLLDASAKSDLKQSVDWLLSTQFSDGNFPSSSDRIGLSEELVHWCHGASGVLHLLIVASLEFKEDKYLESAERCVNLIWARGILRKGPGICHGVAGEL

SEQ ID NO: 163799 - protein, 293 aa, Heterodera glycines
MSLLPISRCSSLFHAARSLACRRPPPLASCHCLLSVPSTAPFSSHLSSSSPVVLHSLTTPVTSTHWCHRRAFASQSTPSAPAPNSTNNTPAAAGRGGIGLYHRYKQWLQNYPALYKLHRLTVDGSKWCYSDLKTFFWLAYGLRKGRITLNDLNARELFIYIQAGSQLVKLSLLAALAVLPAGFPLIIISMLVSPKLVLTRHFWTDWQSQQFQMDDLRRNERKLFPRIVDALRQHNPSSAAALAALEQQLPLTVDQLVTLQKSANIVPASLDAYTQQHRFFLKRVHNLPFWTTD

SEQ ID NO: 163800 - protein, 245 aa, Heterodera glycines
MSSSSGHPQTSSASAIRALQMELRSLQSQPLEGFTVTCDDDNMFKWTVGIFGPPGTLYQGGYFKAHLKFPTNYPYSPPTMRFIHPVWHPNVYENGDICISILHPPVDDPHSGEMPSERWNPTQSVRTVLLSVISLLNEPNTSSPANVDASVMYRKYKDHGDQEYATIIRKQVEKSKEEAKKDGIKVPETIDEYVVKAKPRVQGNESNDVIELDEDYYDYEDDDTDEDAEYGGEEEQDSGQGDDES

SEQ ID NO: 163801 - protein, 138 aa, Heterodera glycines
MAQNFRLFCHQTPPSVNSDGSEAKRRQINEPPKEGSGGAPSLSVDPFGWEPTKWERFFLVLTRCYERSADIPAIIPLRVGKQYTKRMRLLRFSFALLVAIIVCFGAEFYMASWDRRMRRGQLSDGDVKFLEKMRDKVR

SEQ ID NO: 163802 - protein, 217 aa, Heterodera glycines
MLKVIGNKNQFEAFVSSTEGESKRSLFVHFSAPWASSCAQLDDLLMELQREYGQNAFDIAKVDAESLPEVSMAQKVCAVPSVIIFKGGKVAGRVEGFQPAELKDWAAKCSLDSFSAGESDAPSGAAICEDPNSRLKRLINTARLTLFMKGTPEGPKCGFSRQIVDLLRSHNVDFWTFDILADEQVRQGLKSYSDWPTYPQVYLDGELLGGLDVIREE

SEQ ID NO: 163803 - protein, 339 aa, Heterodera glycines
DHFRLVVVGGGTAGCAVVSKFARILPKQQIAVIEHQNIHYYQPGLTLAAAGLMDFEQLHRDESSILPHGVKWFQKPVHRLHPDSNELFLKNGQAISYDFLVLATGLELRFDLIEGLPSGTESVLLSPSISSIYFPDGAKKTLEELKNFSTGEAVFTFPSTHIKCAGAPLKICFLAEEILRRKGVRSNCSVHYYTALGRIFGVPKYAASLERIVKERGVEFHPRHNLVKVNPEKHEAEFELLDEKGKGTGQRQIVEYSFLHIGPPCSPVKVLREYAKESRNNSNGTQLTDPEGWVNVDPGTLQSPAFQNIFAIGDCANTPNSKTAAAVSSQFKALSKNLK

SEQ ID NO: 163804 - protein, 315 aa, Heterodera glycines
MRLSLSRFASTVAMFAGGPIERPLAYYSQFRPASLTMHQYLDFGRKGSAFTSYHFLKTELLVRMANIMQEFDLLPAKLMQTPSARHVGSWYKQSFSELLHFEGLEPSDMALDKFNNQLRTILHRHNTVVETMAEALLELKESHGVDIACERNIQYFLDRLYLNRISIRMLQNQHLAIFAAACDTNGTNNQSRKTVVVDPAGHVGHIDPQCNVRDILLDAYENARFLSEQHFCVSPMLDLRCFNTRIPDQQISVPLVPLHLYYIVFELLKNSMRATIEHHHRVKGFDADSSDDLAEVRACIVLGAENLSIKISDRG

SEQ ID NO: 163805 - protein, 139 aa, Heterodera glycines
KMAIIAKVFLLLLLFLMSMASLLFCANWPKNTVPLETYVDESLHLHCKLCNKIANSASDGAKWLQKSEEGYVSLLKFCIDELRNSDKRSQTLPAEEGHHQFLFACHGFTADKRKLSETIGAIAKKEADFCKEQKYCQMF

SEQ ID NO: 163806 - protein, 130 aa, Heterodera glycines
MSKTGLSAAIDDEFDPDIDLSQRSRSDWVGSFAGNPSTAPTVYAMFNNSVWTFMLVYGVTGRFISASVVSLLTMPATAALWVWEADRDYERWEGSRVLRERRVPKFVLPRTIFDWSDFDYAQQMRKAPTG

SEQ ID NO: 163807 - protein, 172 aa, Heterodera glycines
VAQRFLPMKTPLDSSYDHLIESPKYFFHPSSVFRSPLLGATKGAKIGLWVDLTNSDNFYNEEEVLNNGSKFLKMKMVGHKQTPTPEQTTAFIEAIDRFITNNPDDVIVVHCTHGFNRTGFLISAYLYEKCDMSIEMAVREFAECRPNGIYKQYYLDDLRKRYGDEDEDEMTV

SEQ ID NO: 163808 - protein, 148 aa, Heterodera glycines
MAPPKFSDLGKSAKDLFSKGYAHGFMKLDVTSDVAPTVQFKTSAAHDLNSQKLDGNLEVKYKILEHGLTITEKWKTDNQLTNVLELKDKVLRGLKLTVETAFKPHVEGSRHAIAKADWANDAFHVNGDLTLFGGPLFTGSFGAKMSND

SEQ ID NO: 163809 - protein, 139 aa, Heterodera glycines
PKGPMCFSFTNYCLIMVKKKCLLSTKCVKMPSNYMRNQTNDTGKDEASIAADTGAGKKKLPDAEQKQTTDTKERKSPIMVDKGVQVIPERTIFPSPSFSSSFRTQLPASPILRTAKKEQTSSLVLPLRDASNHEKLSFD

SEQ ID NO: 163810 - protein, 210 aa, Heterodera glycines
MSLSALKKQFNKANQYLNESIGTAEATKLDEEFTEMERKVDMTNELITQVIAGTNEYLQPNPAVRAKIAALGAMSKVRGSTKNQSYPQTEGMLADTMQKYGRSLGIQSDFGKALCDAADAFRQMADVKYQLEDNVKHNFLDPISDFQNNELKDFNAHRNKLKSRRLDYDAKKRKQTKEDELVQAEEKLEESKRLTEKAMFNILNNDVEQI

SEQ ID NO: 163811 - protein, 129 aa, Heterodera glycines
LVTIQGTAYTVADMANLLALANVPNLATIYQNSASQINAQQYTPMYCVHGNSADSTPQQYAYPNGINSTGTVTKGAGDGTVNIDSLRVCQQWKDQGKLVNQVVEIANVSHERILHTRQFYDVIDSILIA

SEQ ID NO: 163812 - protein, 218 aa, Heterodera glycines
MSSSKITRDQLNESVAEVLKQSQEKKRNFRETIELQIALKNYDPQKDKRFSGTVRLKHIPRPKTKVCILGDQKHCDEANANGIPCMTADDLKKLNKDKKLIKKLSKSYDAFLASESLIKQIPRILGPGLNKAGKFPSVVSHNDMLNAKVDEVKATVKFQMKKVLCLAVAIGHVEMSQDELVSNISLGVNFLVSLLKKNWQNVRSLNIKSTMGPAVRLF

SEQ ID NO: 163813 - protein, 202 aa, Heterodera glycines
MSSISPANPKKFSIPSETNCVVCVDIATGNHYSVASCNGCKTFFRRAIVNNRSFICMGNGNCPIDKGVRCACRACRLEKCLQVGMDPNAIQSERDRIGYTKRTRREKLVGFDEGIGHERGDLCAESFASNDADLEESDEDDVIFRDTEPIGCSPSVNIAQRSKSQLYEEVLERLTQLENNFTLLLSRSEIQPYATLEEALKA

SEQ ID NO: 163814 - protein, 302 aa, Heterodera glycines
MSENMGAIFENIALHDFVVKEVINSFPDKKSIFLLLAKSDEKALLICNKQAFEEEVANVSDWLVKSKLRYIDSNDRFGNFEMALPSESNQIKVTFIYPATEWDIEKYSRQTPFFIYETPEDYKNITLNYLSEIDYVKQLKWVYNFLEKKSESERIVFEDEDKQNGFVLAPDLKWNGTNVDDLYLLAIAHRHGLRSVRDLTPDDLPLLENIRDQSAKLIKTKYGLDQNQLKMYFHYQPTFYHLHVHIVTLKYDAPGWGGTSILLQSVIDNIKNYPNFYKNATLPFIGKEKHSLTKKFFEAGRV

SEQ ID NO: 163815 - protein, 137 aa, Heterodera glycines
KFGVHGHLFSVLHSVVVQVGKVDFSGSDLILQKCDVLLRLFGAFFHIFQVFAQQLSRFVQFVFDHNIGTEPNTNFVHLFDQCPRVKVLVQFVSDLDRVNAFFNFVLRAFRERSNSCGSLEYFPQSLPFAEVRSSQTF

SEQ ID NO: 163816 - protein, 286 aa, Heterodera glycines
  unsure (1)..(286): unsure at all Xaa locations
MPIFGDPSSPYDEAVEKATAETMTNENWTLMFDICDRVASEGPRACKQCLLSVRKRLNHRDPHVVLLVLSLLDCLWNNCGTHFRREVSSKDFVGELNYKCTNSNRVVAXRARSLVKKWAENECSKDSSLSLVESLYRDLRDQGLSFELDSTTNNHCQKKKAIVSNDPNVMSSEQEEADIAKAIALSLPEGGKQQASSRNFYTSAVVGTAPTRHMPINSTTQKSQLKKVKALITFDAAEDHQVSFLAGELMIRFRQCGPNWGGRVNRTRRGSHRDFFRGSVLTKNFN

SEQ ID NO: 163817 - protein, 87 aa, Heterodera glycines
ITYTLPKIRHSHRFVQSAKTAANVCTEQNGGHPSKSPKVAGAEFRVIYKVFAVPDGLVLLLTFTMTCLQFTRDLRTFRKNILSVERL

SEQ ID NO: 163818 - protein, 257 aa, Heterodera glycines
MGEFRVKFRQLEADIEELKGKNEAIQKRLVEFEQKLSTSANYTRIVSGQEMIRILAKNNWNQTDSHKELFLFKPNLLKVVCLGAEKVPRTVRAKNRAPKNLEIVYYEVKILSAEQKDFGTQNDSIGIGFAPKSMPLGTKVGTHPGTFAYFNDGNVRGHRIVGSTKQNLAKFDAGDVIGCGLNLTSKEIILTKNGERLGKKEQPYHRFISSHYGSELFDSNFFFASKETDDLYPAISLNNPGDEVEANFGPNFKYTLN

SEQ ID NO: 163819 - protein, 264 aa, Heterodera glycines
MYIRELKSPDIKPPEELLQVFSNPSRRSIRLADEARQCAYQNEMSRLARIIQSQQWTISSQQRTIESQQRTIEMLVSRLPRNDGAAAPPNGDERRDMGGAPNEQQHGQPPILQIDNRPHIAPEPNGRGGQNGGGHGQRPNGNANIVRGQNVVPVAPPPFVAQRQQEQGQNEGGNGRRPHGNANIVRGQNVVPVAPPPFVAQRQQEQGQNEGGNGRRPHGNANIVRGQNVVPVAPPPFVAQRQQEQGQNEGGNGRRPNGNANIVR

SEQ ID NO: 163820 - protein, 297 aa, Heterodera glycines
MLSKKSEGVTTIALEEGLIDVTRTDSESKPIWHDAIPLNHVVAVRQSRVKLRSGVPTGNVSSIESANSNSLFLYYSYRRNAYAWRIRECVIKFETNTDVEKWSTLLGNALTAQKHRPKRLLVFINPFGGKGHAISIWEKEVEPIFKLANIQYEVRKTERADHALEIVREFSVDSWEGIDGIVSVGGDGLFNEILSATVIRTQIEHGKNYNNIETVLERPRIRLGIIGAGSANSIVSTVHGVNDYQTAAIHVAVGNERMVDICAVYENGLLSRFSGDAISCGWLGDVLRDSESYRCLG

SEQ ID NO: 163821 - protein, 213 aa, Heterodera glycines
MMFFQLSSSAPTSSSVDGPQQFFQHHHHQFVPSISPLFDTSGAGMLGTLAAPTTASIFMPSLFGGCGGAAAGDGTITAAGSLMQSLLSAAVCSGAFPLVGTTVAASPLTATTSQHRKLFIGGLSHETTDEQLRDYYSKWGKVIDCIVIRDPVTRQSRGFGFVTYATIEMADSAMADRPHTIAGKVGDPKRAIPREQMLQATSCPPAFLDVEPP

SEQ ID NO: 163822 - protein, 188 aa, Heterodera glycines
MGLLFMARINYFRAFSSTVSRSFKQVKHTVQDNVTTIELVDVPIASTHRELKESAATQSKTPDDCSCVLCKIPTSISYKDVLILEQFMRLDGTVFPRQLTGLCHDQQQRLERCVMQAHWSGLFPDRTIPEFDRAGYKRFNRHWDDDLAMFRLKYKLHPGSWFYIKRYNPRIREYRPFKADEIPDIERE

SEQ ID NO: 163823 - protein, 234 aa, Heterodera glycines
LFSQIFNQMACSVRLDHHILLPSHFFPKFPPHGPPPPIPPPYGEPYIPRLARRAAGSLSTLSSCAVISAEKAHKTTKRKAMIKRRGDILRVISARVLKASCRIRHEGMANFLYIYSSLRILPQSVSSAFSIVHCQRNISIDNKCHQQNQAFAKGNNFQLPKQQKDAREREALERQLRAAPRGRFSLPNVDRVYNSDEVYEELCKPAKDRAKALFLLSIVVITVCFITDLEHSRK

SEQ ID NO: 163824 - protein, 123 aa, Heterodera glycines
  unsure (1)..(123): unsure at all Xaa locations
ILWRLLLHWQHRSNWHPFGWAEERNGPLKSQRQKKRKNGKRSERMSRRGRRQHSQRTQKRRRKSRQRKRQRKSQNKEXWRKRAKRKRRKRKEEKQAKKESKWARRRRSSSRRRRSRKRSGTER

SEQ ID NO: 163825 - protein, 105 aa, Heterodera glycines
MLIQDGAIAKSEGDLVNAERLATVVLRMIAVGPFFAPSVAQANAQINASGDEGNEFNRLTVLFSDHQYDIVIGNSAGGISIGGGRQTQHQKQTIHVVKRTLPICE

SEQ ID NO: 163826 - protein, 123 aa, Heterodera glycines
MSVPETHSPTVEQLPKLPTELQSEVAQRAGLKHVTTLEKNVLPTKEDLEEERKHESLKKGIQNFDALKLRHVETEDKCMLPSSNDIAVEKTPQLAAEFDQSGLKHVETTVKTNIEVIDKAEQN

SEQ ID NO: 163827 - protein, 197 aa, Heterodera glycines
IFVLLKMLSLAIRRFIVQHSNGTFMSTNFVATSSNFLLMDQENDKETKKDFRKIVKLLERSPTQKRKKEQEKAEENAKRDKREENGREEERTNWKEHISKSLHKSYDEYATRKSMESWKRRARRDTFCYMRDRNLPDLVTYTHRYIEGLTELNGKNNQRSFEDNELVVVVLKFVMNELLKGNNVQSARNERIEKKPK

SEQ ID NO: 163828 - protein, 300 aa, Heterodera glycines
MMMNSDNSSAINSKSFDQISEIGSMATDGLLQDDGVPDYAKIIIKQQQALIATLMNMQQQQQESRYASTISLFQQHQPHFLSNNDSSFPPPGIPTHPSPPPGIRPPVSPAPVSAPPPPPPGFRAPPGFNVSVSSRKFELDSTKSDTGGSHKFDIREELKKAFALDDTNENDSSSAEQQNLSPRSQNIREAQNARLPMSSSFSSIENLQNFTGLSQQDSSSPVSALSRQPIAAAVPSPQSASSSVCALALNYVLVDQMVLNYERVYEQKEKMASETLTMVDRQSSPERSIYQRFANLGAVL

SEQ ID NO: 163829 - protein, 143 aa, Heterodera glycines
MGKPRGLNAARSLSNRRRDQRWADKQYKKRALGTAFKSSPFAGASHAKGIVLEKIGVEAKQPNSAIRKCVRVQLIKNGKKITAFVPNDGCLNYIDENDEVLVAGFGRKGRAVGDIPGVRFKVVKVSGVSLLALYKEKKEKPRS

SEQ ID NO: 163830 - protein, 114 aa, Heterodera glycines
MDPPSVIASADANGDQRQQGGDVKIEQVRNQLDGVTTVMSQNVERILERGERLDQLDNRSQALHESSQSFTHTSQRVQRRMCLQSMKWSIIFGLFLCVMLVLLVLTILRIFNVI

SEQ ID NO: 163831 - protein, 104 aa, Heterodera glycines; identical to SEQ ID NO: 158774

SEQ ID NO: 163832 - protein, 140 aa, Heterodera glycines
  unsure (1)..(140): unsure at all Xaa locations
WRNCHVLAVPLASVTASIPTSENVLGEEDCGLYILMSGLDSERLVFAAAPLGLMQSACDIAFEYAHCLRQTDRQFSGXFRLLFRISTPAQLMQGKLADMYTRLCASRAYLYAVARNAVSAECLKAKDSAAAILFLAEKAL

SEQ ID NO: 163833 - protein, 220 aa, Heterodera glycines
MCSSSVAAFRFCQFSSSLFKAQCPQRIFCRAASTVMSTSEEFKKQTIVPDVVTKAPEKRAKVVFDSGVEANLGNVLTPTQVQNPPKVTWEAEAGKLYSLIMTDPDAPSRKEPKFREWHHWLVVNIPGTEVDKGDVLSEYVGSGPPQDTGLHRYVYLIYQQKNTIKDTEHGHLTNRSGDNRGGWKTEKFAKKHELGDPVAGNFYQAEFDDYVPKLYKQLGC

SEQ ID NO: 163834 - protein, 101 aa, Heterodera glycines
  unsure (1)..(101): unsure at all Xaa locations
EGYLSGISYSFYKIFPFQMLPPKEIWENDAYDRWNDFNVALIIVICVIGFXTXTRYAPQLPFGLQWRNAIKRHGSHGICLPLIALTSDVRWNQWLWKRAIW

SEQ ID NO: 163835 - protein, 109 aa, Heterodera glycines
LLVLKYLRKWQSLHRKWQQLRNLNTSPAYTTKRTLSNPTTVVQTQEASLNQQKMWSLLNGPKRKCKSKNTVRSSLLRRNTNGQKWNRIEKKSKRRKCIFFGLIKRSFDD

SEQ ID NO: 163836 - protein, 142 aa, Heterodera glycines
MSIDEIERTIPLPSSHLFSHSQFVRAEIHSFEEAFVHNKRFKEFEGLLKTNHKTYESVEAKFDLQKIEKMSTLTNRLNKLADHLGKIGHLHFEKGELNAMDLEEKPMFEIVRLAEQKQHEIEEGRRNGKSKAEKVTEAMANE

SEQ ID NO: 163837 - protein, 186 aa, Heterodera glycines
METMKASSSSLCYKNSCFLSDLLSNTNRRGNLRLLESEPFANEAATEAETERLLFAELEQQMDEDGNKQKHPDEQMPCHSASSSAFSADNYHTQLPIFCGVCFAECAAFDSFALRRCEPFGATHTFCDDCWRQHIGQCLSNGRVPISCMAPNCSSVVRPSVALLVVGQPIAQRYRQLMVKRRRLCR

SEQ ID NO: 163838 - protein, 176 aa, Heterodera glycines
MSDIAGASSSAFSADASSTKKKGDFLFLAELGEGSYSTVYLASERQTSRKFAVKMCLKKKIIKEKKVQQIFRERDILRLLSTPANACPFVVHLFCTFQDDESLFFVLSYAPKKDLMARLKKLQRFSVGQCQFAMAELFLALEHIHALDVIHGYVNAEKIWLPEGRDILLSDFGCAK

SEQ ID NO: 163839 - protein, 187 aa, Heterodera glycines
EMNRATANEVSVFDDFHSDIEKSKKINKDRLSKFCPKLFKKENGIGMSSIASVPFEALLAGEFVFPCSSIHSYVHNAYKSKNPAEIADELELLLNKLTDFCRSDSDFEKVLNFSLALSDCFGRLFFDCKSLELNMKLVRMQEKVKNLTSAQFLFAQNMALIKNKAAFVPSFDDCSDYIVKEIRMREL

SEQ ID NO: 163840 - protein, 152 aa, Heterodera glycines
MNSNSLLFSLFTLLLSIAANGHFCFGKAMGQQRSRRVAAVDNGNFIVVDGSVSVVNGVISGNGCYYHDGKVTDYGKTRTLTGAERAKLKKFIDEMQQMSVKFAQEMQRMFSATFPFGPPAAPPPQFHLPPQVPCFCSSSSCSKFREKANRMK

SEQ ID NO: 163841 - protein, 154 aa, Heterodera glycines
FFFFFFFFFFFLKSDHLLERKNRFMHLIIEIWKKGLKWGRKGGIKLKMNVYFFGIHPEFFFFFFFTHSLHSLFTTAQNALIPSAATGTDVERCFGFLPAFVHFLVVPTGHLFIPISRNKIGANEKADNYQQKKHNETQMEHLEKAENYLKLLKA

SEQ ID NO: 163842 - protein, 260 aa, Heterodera glycines
MDISLSLNGLGAKPLVPIADLGDSNKYSAEETDCRNKLASLYRLVDLFHWSQAIYNHITLRLPGKNHEILINPLGMIYREVTASSFVKISVDGRIVDPGSTPLGINQAGYILHTAIHEARPDVKCVLHLHSASGAAVSSMKCGLLPLNQESMVIGPVAYHEYCGMLSAEDEKTEIVKHLGDKKVIFLRNHGFAACGASVEEALHLAYHTLIACETQVSAMAAGEKNLIYPYEIAKKCSYDIAQHGANGMNRTASAQNGTM

SEQ ID NO: 163843 - protein, 288 aa, Heterodera glycines
MTTITPQQKPILKAVILVGGAQKGTRFRPLSLQLPKPLFPVAGVPLIEHHISQLCEQLENLHEIFIVGFYPAEQFANFISDCEKKYRRVPIRYIQENCPLGTAGGLLQYKDILIDRKPPDALFVLNADACGEFPFLEMVQELNQKTEAKCLILTTEATREQSVNYGSVVIDSVGLECSRGRVLHYVDKPATFVSTHISCGVYLLRGNSFDVILEQAEKTASERGLNTDSPTMQLFHSNQLWFEKDIFPQMTSDGTLFAWHTNRWWSQTKTAGAVLYANRHYLGLYRAR

SEQ ID NO: 163844 - protein, 111 aa, Heterodera glycines
MLGHFSKLSVRCYASATSFRPFFDRVLIERFLPEQKTKGGIMIPEKAQGKVLEGTVVAIGPGYRNDEGKTIPMQLQIGDRVLLPEYGGAKIVMEDKEYHVFRESDIIGKFE

SEQ ID NO: 163845 - protein, 158 aa, Heterodera glycines
MLIRSRQQLCALFRSSIPLLKPRIGCYSVLAQMSTEVEKAQKAKPGGDTIFGKIIRKEMPSTILYEDDEVLAFKDINPEAPVHFLVIPKKCITALSNSEEQDQAVLGKLLLTANNVAKAQGLSNGYRIVINNGRHGCQSVYHLHLHVLGGRQLGWPPG

SEQ ID NO: 163846 - protein, 391 aa, Heterodera glycines
MAVDVNSALTKAYDELRSIDMNISMLSGVSERFNRKRSAPTNDSFSTPFDRRVQEGGRKIIIGPESSDRNAKRGRYAADEGPPGDYSPPSSARTHRTLQSSVVMPTIETKSRTAVINEMKKNENKEDQVRNRRLFGNLLVATLRKFQNEEKTVGSKGQVQIDKQREVERRLEETEKENRNRMMREREALMAKKREKEMEIQSLRRQKAIEQSAEEKTKHFRRLQCFIQTQTKPPLFFLPSKHTLRTLELLKESSKKIETLIELRRDEMTRELRRLDTYTTASFGGTIGQAKNNVADESDDQDEEETNVRGGLKSAIVVKMEGMTGETVAEAEEEKRDEEEGEEETGQKDGEGEDEAEPKDGEEGEEETGPKEGEEQAEQQQNGRADSEGPD

SEQ ID NO: 163847 - protein, 228 aa, Heterodera glycines
AAPFSVRFCHFCSQQPTTRLSTTTTTLSTSKTITAVAGRRVFPPPPFATAAPSLRLASFSPLSSPASPLPPLLSKLIIGAFVGRNNSPRRLLCPQQRSSSRALTLAKGFFLSTSAAFMAERSGAGHINHNGIATLSERNAHRTSVQQCPSFAPFKPNRALIVSKSSLLEYEFDRRGPKNEYSGLDDPRFLKELHIQQINMEDLRIRHKLQLHYLDTIVEELERHKIEW

SEQ ID NO: 163848 - protein, 313 aa, Heterodera glycines
MDLAKAYGAPYDLVEQTLNKRRKMLRKTAKGTSRNIGPKNAKDAAYDHKMIRHKIFPMAAASYGDTENVKNCIRNTFRNATLYRNSVVQCNGKAYELCSAFTAVSHEDKAIILSFRGTDTGYQLIEETIQIALFKRSQSPDEEWGKVGSYFLKIFNQLVEEGKIIDYLAKLVNTYNNYELWVTGHSLGGAMAAIASATIGDAKLISAQRLKLVTFGQPRTGNGEWATAMDQKVGPFNYRVVNNRDLVPHMPPLWFEGYRHHMTEVFYNNAKNKTEEFVICADEAESEECAGKYWFYNVRDHLNYFGKSVSEWG

SEQ ID NO: 163849 - protein, 88 aa, Heterodera glycines
MFTFLCCCCCCTISNSSSSPPDAKYDESIEMSPSLWSLVSAGNISSSQMRKSQVNWTPLKAVQNAGLTFKMADSPAPISRSVIRTGQV

SEQ ID NO: 163850 - protein, 270 aa, Heterodera glycines
MLSLNGTFPPQSLKPLALAFVLDGGIGSQLEELGYPINNSVIWSGEAIIDAPDLLAKCHKKFIDAGADIIETNSYHVSIQKLMESRGFSLGQAESILHKSVLIAREAIAASGRPVALVGAVGPYATYLRDASEYTGAYVKKPDFQEQTIIDYYLLQCRPLIAAGVTTLNFETIPSVKEIECVAKVMDQLDDTVQAWVSCSCQDRKRTRSGDAFADAVKIANGHPKIVAIGINCTAPDHITELLTEAKKANNSKALVVYPYSGQVYNAETR

SEQ ID NO: 163851 - protein, 216 aa, Heterodera glycines
KENYIKKSKMDAFQQFKREDGQFRHPFTMIVSGSTGSGKSEWIMRLLRNVDKMISTPVERVIYSYGELNTNVMNLQRAGKVANVPVTVHSGVPRAEQVRECAKKEKTLLVLDDLVVGMSQQYLDALFTRGSHNWGVSVILVTQHLFNKELRVARTNSHYLVLMRNPAGALQIRTIATHLFPSRTAHFIEAYRDACAKNFGYLLVDMHPESPEDIRL

SEQ ID NO: 163852 - protein, 241 aa, Heterodera glycines
MDGELNQGTDPKIVHRDVIEMFPELDLTQIVSEFGHLSPEGLAGIVIDRMALIPRKKNGTLKRKADNESNDEVLSEYSGGSETAEQLGNLLVDKMLGEMLRSCKVELRSKRAVVDSSAWTGVKTLMIEHFPMVRADFVTKMVRHFEGAIVPTAIACFFVENSFGDKLQKIAPSFNQSFWYKMAIPIQCRGRRLKQAYVSEQLREHFKLYNELMCQYQSQYPELLTGLKLTQQARHILLERS

SEQ ID NO: 163853 - protein, 215 aa, Heterodera glycines
  unsure (1)..(215): unsure at all Xaa locations
MPNSGVQNHYRKRVAYYYDSNVGNYYYGQGHVMKPHRIRMTHHLLLNYGVYRHLDVYRPFPASLEDMTRFHSEEYMDFLRSATPETLKQFNKQMLKFNVGEDCPVFDGLFEFCQLSSGGSLAAAVKLNKQKAEIAINWXGGLHHAKKSEASGFCYTNDIVLGILELLKYHKRVLYVDIDVHHGDGVEEAFYTTDRVMTVSFHKYGDFFPXTGELK

SEQ ID NO: 163854 - protein, 95 aa, Heterodera glycines; identical to SEQ ID NO: 125597

SEQ ID NO: 163855 - protein, 326 aa, Heterodera glycines
MSDSIPRAVELFMEKKRARISKFLYTYNGNLQLNLPQLHAFACSTGGLIDDEFRERIWPILAKNLPQAKRCKDTQWDALRSEEYNDQTNHSSDELQQQQQTLFLSDSDFESALSTFTPSISGCDDQLMDAEDDAEGDDAQRMAPQNATVFDFSPDQLRAHKEWNQVELDVARTLARFPPNIDEDERACLQNELTPLIVRILCENEDFRYYQGFHDVCLTFLLVLGADSALQVMRDICARGAFHNYLCCSLEESAMRELQDLYVLLFLHDQEVEKRLRSAELGTLFALSWPLTWFSHALQNYSQVVLFFHLFLSSHPLMPIYGSGRV

SEQ ID NO: 163856 - protein, 385 aa, Heterodera glycines
LSRVSLVAIRAAMSAIEGETCGVLGRLQFEVHAIVGFARLCAGDVFEVSVRHGHQRWRSRGKTLADKSQRWEQRMSTMDVLWNEPVVVKVLEVKFLKSRCLNERQFDPAKFALAQPQLVTMNLNSAGSIKLRLVVTWLPLLATKTIGENSLNNCQKGNLTEREKQRTDHRTNGSKQNARLTQNEQKKREEEERGREMQQQNTETKEEDQCQNESADGAAVKVCLRDKKRQREQRIQLGNSVSTGSNFGIGKEKWRCSSTTLLDDVYKDLAKSIPTIDDLTVLHPSHFASLPSSSPRHRSFDSESDRAKTEAKNPRRIFSFIKRGQSEASADQQKKDWRKSASLGEIALAKDECFTTTNAEKASPVSTEKNGNGAKRGKPSSVKKG

SEQ ID NO: 163857 - protein, 194 aa, Heterodera glycines
TFDITVQNTASNFLRNNYIFITVGKLNSAVETIDQQFIEVQKYSKQDKLLEMLKTDAIWRPRPNEDPFLKPAKKTLIFVETKRNSDRLAIALTQEKFYNTQSLNSDRTLEQRHLAVPKFIQGQYDILGATDVAARGINIPNVEHVINYDLPEKEIDTYIHRIGRTGRAGNTGLATSFFDPTSPEDMAHGAFYVE

SEQ ID NO: 163858 - protein, 275 aa, Heterodera glycines
NNRIWATNDQLQVDFPGPITGLFKGKQTSSATNCFAQPATLYVKWHSLQLLSPIHRADHCNYASEYCQLQDNSSLIWTSACPNDNCFMCDFQEAEEIHGEFTKLNGQTTAFWISEDRQKALTFTETHAVQACDGRQIVLSEQNFGIPKEQYDIIMSNHTRERRNVQPEQLASQLSAAQLATTMALSQLYLKECQRNVRVSNPTLQARKLLKRDNLQARWISETTIEVFPCVPISLSNISYRTTKDCYKFIPVTIHLPNATRDAFLDPEMRILSLI

SEQ ID NO: 163859 - protein, 130 aa, Heterodera glycines
CDIGTFASNRIFLTLRLQRTLPRKDTRSQTSTQSKCSRRSTSSRSNVKLGKARLTKSSQIKVPINEEEMMSFPGMEEGSQKSDKISTHRRFWQLNCKGVHFSGLPTWLQHNEFLHFGHRPPLPSFGSCFN

SEQ ID NO: 163860 - protein, 160 aa, Heterodera glycines
  unsure (1)..(160): unsure at all Xaa locations
MQKRAAVCVLVGDEDPNVKGKINFIQEKDDSPVTIQGEITGLXPGKHGFHVHAFRDLSSGXMSAGPHFNPTNKTHGGPXDETRHVGDLGNVLAGQDGVAKLDFTDKVISLVGPHNIIGRALVVHKLEDDLGRGEGLKKPESMETGNAGPRLACGVIGIAQ

SEQ ID NO: 163861 - protein, 212 aa, Heterodera glycines
FMTKLISCRRTAIAWEFSPIVFCPLAVISALFFGVGCNANHLYSEGGSFPVLSSDNSPPIPNDPPTFGSPADLLDNELQQPNQQYQTEFAPSMEQMVDEQRRNRLAKIIEQMRDNGQFSQQEIADGPGLFLEEGEANVPIERPSETETYWDGLKEGELESSEMFGENEGKKIAAVKKGQNEFVEFVEPRQHQNNRHKEWMDKRVPTDSDRKT

SEQ ID NO: 163862 - protein, 262 aa, Heterodera glycines
  unsure (1)..(262): unsure at all Xaa locations
MGSKRRLLLHFSQAHQTFRRAEFDAICQIKGISVVPNSPSDGIHIQSFEFQNDEFDVFRLLERAVLVKAAYELIAEGDGHEQVMAKLASDPSSSLARFDSADQSWSLLVRPHQKKRSGDYARSVVERYTAIPLLTLAPVDLAHPSNVFSVIEMYEANGRRETPDKVYFVRLXGEGRGHLKTLFSLSQRRYIGNSTMDPELAFIQANLAKTRPGALAMDPFCGTGGLLLPAAYFGSSDFGAQIKWDVARARGRSSRDGEQWLC

SEQ ID NO: 163863 - protein, 273 aa, Heterodera glycines
MIGFDPTNEQNSGQQLFMAEIGQRINNLIKFNIGPKWMSLNFAALFFRFFGFPSEAANCLEAALTFPQFLDISLTQLAQLLLHLNPPMENAKKENDGIERILRIAMQKGENEPVPFHLMGIFHLRQNRSVLAYRFFREALDRDPNFEPALNELLRMKCTQRVGKKPRLIRDIYAPICCWPNEQNVVCFERRAKGSVWRESVRCFRLESPPVSSGGEFPAVHFVYFRCNTPYTGRSYPPPPFAPLVAPLLRPAGRNCVKLNFVDSSNKSRLRNH

SEQ ID NO: 163864 - protein, 266 aa, Heterodera glycines
RIVEPKREESKTDKENRSKANSRPPSPFSSSSQRPRRSVSPVSVSNGFHNSRASSRLGSTNSLAANHSKTHCQPDVANLRKYSASTLPLAQLRQKQIVYQEWQWRYLIGNGGEALAKMVREVQEAGGHQPNVLSYGYKEVGRLHFSGPVEAVEELHKKITAKISLLNKNGSMMKDSISMEKQFHCQVIGKGGEFLRRLKRKHGVKEINVPSEFSNSDQIHIERPSLFKLRSCKDDLLKLVDDWRNDCYEEVPVQRRFVPMIRGKNS

SEQ ID NO: 163865 - protein, 108 aa, Heterodera glycines
MKRARQSEKLGAFPEIEFAVNTMGVTVYCPRHLQTPRFVPWDQPGRCPSCRSGTVELDYIIQPEGVTIFSNRLKTDGENFVPFDAIGKLLHLFAKNLTLFLSGFCRSC

SEQ ID NO: 163866 - protein, 199 aa, Heterodera glycines
GILQRYEMQQFRLSCANFESESSCCSTSQQMEIIVDSESDSNLTRCPCCRCAQVNLICANCLNTNDVRIGKAREDKRRLLRSKSAICHLIQNALADEIKFEGEFHHLSRSIEEIRAKIAHKKDQVGRLRQRISHTESQSERNRQNVLLLEKKMVSHSDRINRTNAKKTELQKQLMNTKAKLNTQIVHIARFLFHLLRLE

SEQ ID NO: 163867 - protein, 190 aa, Heterodera glycines
MPKKRPSLALLRRGASVVPSPEIHSASSSLESAFSFHQQNVRTAFLFGKNNVLAFSGDREAPGYLSLHHDQNRMLILKWIPNSLLLSKPGGSTTNAVKSPSHSSHCVPVSIKFETVSHLHLHKNEGTLSSSIVLIDSDGVQQFCFSFSLEQHCFSFLKTLEGALFPLFKIDPPLNSIKIECGATGRPLMG

SEQ ID NO: 163868 - protein, 231 aa, Heterodera glycines
HEIHEQIHEFYEVSPEEVKATARGILQRGCESIFKRIFGEYNAEEIIQMRDEGASNVEIEEKITEALNQIRSPQKRQEAGRFAMSCRRIFAMIERRRRSADNAEHSLDQLFKSHLIWLNEQQREELKQMKGSGKGRTEMQQRVMEWYGQLEGQEKQKAREHLRDGCRDILAQVLGKEKADQLKQLREGGMSGTELEAKANEMVDQIQEEEKKAKAKEFGTVCRKILLEESD

SEQ ID NO: 163869 - protein, 335 aa, Heterodera glycines
MTKKGDDESGGEAAAAIRVLVTGGTGLVGSAIRQVVTEEEQQQKPQRLQEQWFFVGSSECDLTDLEQTRALFRRVRPTHVVNLAAMVGGLFHNLRHNLQFFVKNLAICQNVLQCCHETDVERCVSCLSTCIFPDKTPYPIDETMVYNGPPHDSNFGYSYAKRMIDVLNRGYAQEHNRKYTSAVPCNIFGPRDNYNLENAHVVPALIHKCFLAKRDGGPVVGAGSGKPLRQFIYSLDLGRLFVWAIREYEDVEPIILSVDPSDEVTITDVVTAIVKAMQFKGEVIFDTTKADGQYKKTSSNAKLRARLPDFKFTPFERAIAESVQWFEANYEKARK

SEQ ID NO: 163870 - protein, 199 aa, Heterodera glycines
SLLSPTHLLNETSLNLRCPYCPKKFLKNTEAISHMDPCLKSRPYPCTNCSRRFKSAQNLSQHERIHTNVRPYNCQYCEKNFTQKSHLQQHERIHTGEPAFSCRYCGETFNIYSSKIQHEKSICGLHEALDKQKENSSEKNGFAKIAPLPQPSKTTPTEQSSSRGPAVRPTVRTAHNGTIHDRLTFCRKDSASMTHLCVS

SEQ ID NO: 163871 - protein, 93 aa, Heterodera glycines
FSIGGPLILTQTNHIGRISFCCWVFGRILHFISKLLSELNSIGFHIRGGTTLASRLSPTLAIFGTLASHLSFFGTRGENARLSSSGMGTRPLF

SEQ ID NO: 163872 - protein, 187 aa, Heterodera glycines; identical to SEQ ID NO: 162212

SEQ ID NO: 163873 - protein, 193 aa, Heterodera glycines
MSSAERKIDVNRTNYSVVDSEFDSMRERFEKEMRRVDEEMQRLRHEFEGYRPAASRSSPYTTAGTQPIYGGGSSLSNGAGGGAMARHSPTYDPYLENLKSPLIKDESDGKTLRLRFDVAQYRPEEVTVKTVDNRLLVHAKHEEKTPSRTVYREYNQEFMLPRGTNPEQISSTLSTDGVLTVEAPLPQLAIQNH

SEQ ID NO: 163874 - protein, 122 aa, Heterodera glycines
FFFFFFFFFFAIGHLFLRLVNITVHTLLCFLQNIFGIFPLCHHSIRCHWCSVGILFGHSSDKRMRTPPMFRRGPHKPSRTFRGQMIQCQCLRRRCHCWHFHWLRQSKRASKELEVYEKAFPN

SEQ ID NO: 163875 - protein, 108 aa, Heterodera glycines
  unsure (1)..(108): unsure at all Xaa locations
APFINPDEQSMIDWLXNFGPINVGISVPPDMKPYKSGIYHPSDFDCQFKVVGLHSMLVVGYGENIYGDKYWIVKNSWGQKWGQEHGYLNFARGVNACGIEDEPIGLMA

SEQ ID NO: 163876 - protein, 264 aa, Heterodera glycines
MNINSSSLSSLKGRDLTLKPDVSKPRWDQSTYQGRARHFFAVLNPLNLFTSNQGLEESRNIVLDYRKGIFSPELTVERLWKAKHLYESAYHPMSDQKMLPFGRMCAQVPCNMVLIGGMLSFYKSPLAVVFWQWTNQSFNAVVNYTNRSGDSVSTDQLLKAYACATGGALTAALGLNAAAKKMPPLFGRLVPFAAVSVANTINVPMMRRKEFTDGIQLVDERGVPLAKSQTVAWHAVAQVVVSRVLMATPYMVLTPLPRQSVNKK

SEQ ID NO: 163877 - protein, 289 aa, Heterodera glycines
LLLKLIQAGIVDDWDDPRLFTLTALRRRGVPSETVNKFIAHLGLTVAQSSIDPAMFDAFLRDHLNVTAPRTMAVLEPLRLRITNYRELGFIPAKSTLRVKQFPSSINESTDEWEIAFDEFVYIEQAAFREVAEKSYRRLTLEQPVGLRHVNLAVKIDKLERDEHGNPIELVVTANPVSSECKPKAFIHWVARPVLCEVRLYDKLFVHKNPEDPAEVPGGFLTDINPNSLHVLSNAMVDGSIIRTIRPLDRFQFERNGFFCLDPNDSWSSEKKFVFNRIVSLREDAGKNI

SEQ ID NO: 163878 - protein, 180 aa, Heterodera glycines
MRGEAKDPKGEATAEAVSVEKQQEILLMNKLASTGKLPPKSASNFLQKKLQQRKFFDSGDYNMNKNKPIPPPIGQNLTAANTPKLAVPIETEPEKKMEESAPIIVSQLLPMMRPLAGSISGCSMDGGESDDEGGQLQIPRPDTVPQRKSSILHPSAHSKLSPQPHIHHEHTDESLTFPQS

SEQ ID NO: 163879 - protein, 261 aa, Heterodera glycines
  unsure (1)..(261): unsure at all Xaa locations
MLLLASLRGPCRRPRVLKTLRSLKVPHFSTMNRDYVIETVNFTSERDSVFKFLQEVFLVNEPITRVIGCTPSDTSPIFDDICEKCSKFDLSFTAKNNDGKILGVLLNAPFKLENIHESYRDIGRMPNKKEFGEEIRNGPFPSQNANRIHAILTFVNSHIALLPPEEDIKLVELQAMAVGPGHARTGLGSGMLRALIQTASAKGYSHLFTCATAIASQTGLKKFGFDEIKTVPFNSFLEDGXAIFSGVHDNGVGAKLVALHI

SEQ ID NO: 163880 - protein, 231 aa, Heterodera glycines
PSLSRNDLVDHLTRFDRIFEQVASQVYALNDSAEKLRDIFVEHRQKLGGHFALIDPFEKQKERRRLIDAYSALKGIDAFPSSNALLQLGEYFPKQQPGTAQPQFGMTQFGQPSVGGGLFSASKAPAFSFAPSAQQSSTNLFGTPKPTPFGMPTTTATSPSPFGAAAAVIPTSAGASAVPSLFGTSVSSAGGSSAPSQPTFGGFSNTLSSASSGTLFKGSAPAKPTNLFGSK

SEQ ID NO: 163881 - protein, 138 aa, Heterodera glycines
VPLSSVRMTLKIVSSLENLIRLTPDVHSILVLDGDGVPVVSAGEEIRNRSQYSISYNSLVEQAKKLGMGEQKFWVFRYEMNQVVMLRRDAFAVFIMASANANMGILCTMSAQLGPILEECKVIVNEVINGQMAGQSPR

SEQ ID NO: 163882 - protein, 163 aa, Heterodera glycines
DEKGGIKRTILTTEENGVFRRNFAVLFEFICLFAQRMLPERLLISAGHASFAYFFFSGHSSGATADGTLPTESPPLAPPPSNCRAEEFAAGEGPYFDGATAFKEAEGGKAGEYNSKSGAALRVSEPSASEPMRVPEREERAPTGEAAADGWWRSFFFFGSLGV

SEQ ID NO: 163883 - protein, 169 aa, Heterodera glycines
MDGDGDESYCDSDLELERSSSANNVNQLTLVPTEFTSIPEAMQNFNADFDSRYGAQHAPFFHGSLQDAIAEAFDSPAGGAEHRRPLAIYLHDDQSVAAHIFAQTVMSNVNVSNLLKCQFILWAWDVSLADNKKHLFDWLELANLTEVSNYIKMVPRSEFPMLIVLIKDR

SEQ ID NO: 163884 - protein, 158 aa, Heterodera glycines
TALKPPKCLPRVKRSLQPQEAGSYGPQVREGELVFSVAHIFASFNDTFVHVTDLSGRETITRVTGGMKDKADRDESSPYADMWAAQDVAVRCKELGITALHIKLRATGGVGPATPGPGAQSALRALARAGMRIGRIEDVTPIPTDSTRRKGGRRSRRL

SEQ ID NO: 163885 - protein, 154 aa, Heterodera glycines
MSLVVSEKGSFSYILRVLNTNLEGKQKIMYALTSIKGVGRRYANLVCKKAEVDTNKRAGDITAEELERIVTIIQNPLQFKIPKFFLNRQKDIRTGEYAQNVSNAVDNNLREDLERLKKIRVHRGLRHWWGIRVRGQHTKTTGRRGKTVGVAKKK

SEQ ID NO: 163886 - protein, 150 aa, Heterodera glycines
MEPSNENVNGDNVPNAALKGGHPPAEKIGCMRIARKERNLSQQPEEREKSGGTTPASASESGDSAHSEGETRVRPGATNVLAYTDLAKQTKLDYPTDAVRHCHEKPFPSKQAYTAHRTNAAQMQAHQQFQPRRFGHLKFQTREYGPLHKQ

SEQ ID NO: 163887 - protein, 134 aa, Heterodera glycines
IFLYDLTNTFSATKSGWFSFVYVLTSTGNCFSRSCKCQSVGGTRITIVATTVRLALSFGTSGITVTWFGLSTDVGTLVDATASLPALVSGVSQKLDLLAHTLVPVSQKLVLIAQKLVLVSQKTVLQQPIILFSQ

SEQ ID NO: 163888 - protein, 106 aa, Heterodera glycines
MTGTTSATSSTNNTINTNNNNNNGNSTCVKGSSTTHTVTAPPSDISLTERMKHLLNTGNDADVHFLVGSDDKKELLPAHKLILKTASNVFEAMFRFDTENLFRPAC

SEQ ID NO: 163889 - protein, 275 aa, Heterodera glycines
RRILYYHHPDLPNFHYGPQHPMKPARLAATHSLVLNYELHKHLTCVHPPKATQHDLARFHAPEYVQFLKRISPLNADQYEGLFNRFNIGEDCPVFDGIFDFCSLYTGGTLEGAIRLNHGQAEIAINWSGGLHHAKKAEASGFWYGNDIVIGIIQLLKCHPRVLYIDIDIHHGDGVQKAFNLTDRVMTVSFHRYGRYFFPGTGDMYDVGMGHGRYFSVNVPLREGMDDESYHSVFKPVIQAVVDNFNPSVIVLQCGADSLGSDRLGCFNLSFDGHG

SEQ ID NO: 163890 - protein, 103 aa, Heterodera glycines
  unsure (1)..(103): unsure at all Xaa locations
VSWSLLHGVXCGPKSCWFCAGQRRKXKFQXASSARLRKGRRTLLXIIPTELTILISRWXGRFCNDGLKKIDFIYAIFSFIQFLIHDEAYEXTIFPSLIIVITM

SEQ ID NO: 163891 - protein, 123 aa, Heterodera glycines
  unsure (1)..(123): unsure at all Xaa locations
FWRLFTSSRALEMLLSKSSKHRRKTRKLRTNFSGASGQEGSVQKKDMTGNSIRKVLIHADQLERLYSAEWPQIICQTLGHLAKIQTFTSVFYLFFEFKNNFKAQHGIWGNWKTLLINSGHXRK

SEQ ID NO: 163892 - protein, 129 aa, Heterodera glycines
LISIRSVNPSIIGTEAFRLQMCMNSLDQVTVTSHEQIGKFRNIVDRLSKKFHLCLNTRRVSLATIVLQKSRNHIPGRNFEVRQLLALQLQTLDVFGQLVVLLNEFVRKRNDFVNGTHKHGIFFVIHLFK

SEQ ID NO: 163893 - protein, 254 aa, Heterodera glycines
MDRSKTNKGRRERQSLADISQEVISQILRLFPFSSSSLRVHFSPFSSSLLFRAKSTSSVQQLKKQQNIPSQSLCRAVINDNANVQIMDRIRRVASNLSLTAKGQRERRQNLALLWGRGEAKKAKNGEQKERTKEEGALSKLCKMSVDTMAITALPLDCWLKERLKNWVQLSGHEGTIVPASNHTLWKKQPRGNRAEAHAYEEIMRDSELCGITPKFYKEIAHNNETFIEIQDLLAQFPNTKSRAIMDIKIGTRT

SEQ ID NO: 163894 - protein, 97 aa, Heterodera glycines
FHVKPINYSCTCTLHFLDFFTTRTFRGNQRDLARERNLKKQQQQKKQEQGTSTEKRMERDAEAMRLKQQKAAAKKAEEEKANAQAPKVVKVDPLKGL

SEQ ID NO: 163895 - protein, 283 aa, Heterodera glycines
MLFLAYRATLCRNLRLSVVSKAANNVAEQGTSSVSGNKENLLNAYLQLSKCRLTALIACTSVSGFLMSPALSSAPSSLFFSCVVGTALLSASASTCNNVIERQHDKQMKRTRSRVLPVGRLTPIHALLFAGATGTAGLGILCLSCNHLTSALGFVNLALYAGAYTPMKRIHHSCTWIGAIVGAIPPLMGYSAATGHLDSAAFVLGALLFSWQFPHFNALSWNLRADYSAAGYKMMCVTNEGLCKRTTLRHSVALLCLCSFAAPFTHLTTWTFAFTSLPLNLSM

SEQ ID NO: 163896 - protein, 280 aa, Heterodera glycines
LAKMVSAIAQYFLAFLLSASVIAFFSFLLLTALSIFKPWTKRNKSHFVAPRFHFRPEEEEEANAQFPCLLTREETSWKGLQHSEPELYLSVIVPAKNEEKRLPRMLDECLKYLEKRAAKDSEFTYEVIVVDDGSTDGTADVAFSYARSHPLFILRLPKNVGKGGAVREGALCARGQFILFADADGASRFSDFRRLEKQMHSLCNGDVLPSSEPTDWTHPAIVVGSRAHLEEESMSRRSILRTVLMVGFHVLVWVFSGRSVRDTQCGFKLLSRAPAAKLFP

SEQ ID NO: 163897 - protein, 224 aa, Heterodera glycines
RRGPPELGIVWRTINISWHCHGVFKALLSFEFANYSRLNESEVDPLLLSWDVLMRFFGDLDVLSRVRFCDAIDVKTLSNALAHLFNSLSDPPGHKDAICVVSNVDELFAGPFHYKLVDRPFDREHFTSNLFFRTLATIPALFREWHGTLSKTEANTVNEYTQKYLSHLLIQRELRSLENMKRGRLEVRILSKVREIECTYRLEETTMTLTILLPENYPIKAPEV

SEQ ID NO: 163898 - protein, 200 aa, Heterodera glycines
MSSHSSSVVVDNCCPPSQMTTSSSPAAFRSSALAFLQFLNKSVTPFHAVESVEAILKSANFVQKSEYDKLQIQPKDRFYVKKSETSIFAFAAGGAFKPSEAGVSIVVAHTDSPCLRIKPVSKKTSEQFLQVGVSLYGGGLWRTWFDRDLSTAGQVLFRESADADAPIRHKLVDLRRPLFHIPSLAIHLDSDPSKFELNKE

SEQ ID NO: 163899 - protein, 144 aa, Heterodera glycines
GLCSTTSREYYFVIVGRQDQPLFEMDFPPKKREQQQETHHLLQFIAHAALDIVDEQTLRETQMYFKIVDKFNEWFVSAFVTASRIRFLMLHTQKNEDGIKQFFQEIYEMYIKFSMNPFYRQDTPIRSPSFEQKAAMYGRKFLGV

SEQ ID NO: 163900 - protein, 252 aa, Heterodera glycines
MKIQAGHRYEIGDQTGKTYIVTGATSGIGKTIATELAMKNAEVVMACRNRNKCLEVRRDIVLNTRNKKVFCRMCDLSDMESVHEFVRKMTKGKYDFKKIDGVILNAATKSKKYSTNKDGVETNLATNHLGSFLLVGLLLQKLLDQDGQSRIVFVGTDIATKNSLKLELGKLNTAKYTNKFLRSTEKLDIEKGKYDMHGAYKFSKLTQLVFARELAERLEGNNKIRAVVADPGGAKTNLNKDEPSQKFFLTRW

SEQ ID NO: 163901 - protein, 197 aa, Heterodera glycines
  unsure (1)..(197): unsure at all Xaa locations
MCGCPTSANVVHSSPEPPTEKSAELANSSISRSVGNISTSPAKGLACSLSVNQTFKLVGIGCCLTCITNFPSAFMHTSVNTAVMELNSYLNESYTNRGTQLTDQHFSLLRSAINSCWYAGQIVGALCSPRLCDKYGRKPALXLATAMMTLAXPLQMWAKLFPYPEVMVLRPLMASVFSPMGETGXIPFLQEISPTIL

SEQ ID NO: 163902 - protein, 140 aa, Heterodera glycines
ETRQQKSLRGRLGIGTYELATDEAPIGNKKSGSERCGGICIIDPTDLLPIERYIRLPSGVFRPVKVPTNAITPLLTSEVNDNSAAVATLTDGRLALFTTDHFDSIADDSATFLPFSTTLSSGMMLDCAMNSDGRLLCSDK

SEQ ID NO: 163903 - protein, 189 aa, Heterodera glycines
MVDSKAIRKAHCQVCNLDICSTARQRHVYMVHLKKKDLFKCPHCEYTNSNSVWEVQKHSRVQHGKDARPISQEEKHKLEIQMWSQLCFPEWKQKRKIEHGDSTEEETALKRRREGEGGAEVDDLLEGFGELLGHILQQQNEAKNNGQIAEEEGEEEDEQQQESGTTEEQTEEDEWRDNASPSDKAPTTA

SEQ ID NO: 163904 - protein, 338 aa, Heterodera glycines
LLRGTNVGGGGGNASRSIGEVIVPRTSVGIIIGKGGETIKRLAAETGAKIQFRPDDPNLQERCAVIQGTPEQINRATQMISELVTRSSGGGGQQETFYMHVPANKTGLVIGKGGDTIKQISAETGAHVELSRDSPPNSTEKIFVIKVGDVAPGTPLPSFHGNAGITNATTPLAVGNPYGPTPHQAFSAAPAQQDPSAWTQYYNQQQAMAIAGGPPSQPASFGATPAQHYQTVPGTMQTAVSQAAQLHSTQMQQQQIHQQQQATIAQPQQAVSAGMGAVSSSGGPAINPQTGQPDYSAQWAEYYRTMGMHEQAALIEAQMKQTHAAAQAQRPQQQLYMQ

SEQ ID NO: 163905 - protein, 387 aa, Heterodera glycines
FRQEQIMEKYPARNNLEHLAMLKCTEKPHIVRKTGIICTIGPVCRSVDMLVQMIENGMNVARMNFSHGDHEYHGGTIKNVREAAAKCTKKYNVAIALDTKGPEIRTGLLAGGGSAEILLAKDASIRLTTDPAFEKSGTAVNLYVDYKNITKVVTKGSRVYIDDGLLSLIVEEILGDDAAILCKVENGGKLGSRKGVNLPGISVDLPAVSEKDIKDLRFGVEQGVDIIFASFIRNANGIRTIREVLGEAGKNIKIIAKIENQEGEDNVDEIIAASDGVMVARGDLGIEIPAQKVFLAQKMMIAKCNMAGKPVITATHMLESMVNKPRPTRAEVNDVANAVLDSSDCVMLSGESTKGDYPGGSLKTMQQNLSGRTQTAIYRSQILHRRL

SEQ ID NO: 163906 - protein, 242 aa, Heterodera glycines
ALISAEEILDTKISFQESVRKIKKTHEEINRAFDMEKFDIIQRTMRMYFESEDSSDVFEGFLNVVKYVKSLTTEQLDISLVKLALLAFYEFQKLGIAQGQQIPFDLHIDKTLLLDALVPCFRLKTKYIEAISSVFHLKDREMVEVAIAQIKTLLENEVPKAVFWMDHLNLRDHFPFNTIVCKLILENQTALIYPFVGESQFRRNKLIHYLDNLLGLVLRNRRAEDEYEREIMKNQKQLEKVG

SEQ ID NO: 163907 - protein, 265 aa, Heterodera glycines
MFKPKSLLRLFLIRKCVNYRSKTSFSGSEFIERRARLLELVGKARPDFDGKKPFALLLAKRRSFSAPDVPHVYRQCSHFRYLCGVDRPGYRLLIGPKESVLFCALQSAHQILWDGASPSDAQLMCASGVDQVLPLDEFDAYMAGTVRNGLLALDLPSMADHAADAPAQMKKMWKMLSDGVWTHVSLNEHVDTLRWRKSETEKAMMRRTCAVGGEALNAMVRECRKATNESHIVGFLEFECRRRGAHFLAYPPGVAGGSNANTIHY

SEQ ID NO: 163908 - protein, 235 aa, Heterodera glycines
MATKAGIFIVSAKRCAFGAFGGSLKNHTATDLGEIAAAAALKSSSIAAEHIDHVIFGNVIQSSKDAAYLARHIGLRVGVPVHVPAVTVNRLCGSGFEAIAQGGQQILAGDSKVVLAGGTESMSQAPFAVRGARFGTQLGAKIEFEDVLWQGLTDAHANMPMGITAENLGAKYNVTREEADAYAIRSQNRWRLANNAGYFKSEIVPVKLQGNARGKTVQGTNPRESTADKWQLKPF

SEQ ID NO: 163909 - protein, 138 aa, Heterodera glycines
MTMRYFSGRKRHQGVLCVFKKGFRISVSAGNKPSPACGPMDVILKASTGCAAFLLPYGKTAHSTFRLVRDVSLDRLPSIPLERFFPRRIREAQLIIIDEITMLHSTVIEVIDRVCKEFPIATLKALRKRPQGSGAETV

SEQ ID NO: 163910 - protein, 248 aa, Heterodera glycines
  unsure (1)..(248): unsure at all Xaa locations
FFPFRHKAAGQALFEELCRYLNLLESDYFGLEFIDSYGNRCWLDKDKSILRQIMVAQSDARFFFVVKFYTPNPAELEEEYTRYLFALQIRRDLSRGELICTNENTAALLVALIVQSECGDFSPLDYPDAGAYLAGTHFVPHQTPTFAQAVLEQHRRLIGMEPAEADFVLLETARRCDFYGLRLHPARDIEGTEVALAVAHMGIXVFHQMNCVTTFSWAKVRKLSFKRKRMMIKVHPDSFHSTKKQSNF

SEQ ID NO: 163911 - protein, 65 aa, Heterodera glycines
MKTNKRQKVSSSEEEFDPNQKDEDYDLLMDDEEREKFDKMTEKEREIEIYKRLEQREIMKTREKI

SEQ ID NO: 163912 - protein, 255 aa, Heterodera glycines
  unsure (1)..(255): unsure at all Xaa locations
MMSNATKNILGTPTIVDNVSFDPKVSANFLHKAIEEKRKDEIIHLLCTISNQQRQELAREFKQLFGEDLSAKLKKALSGDFEELILALLEPPAVYDAQQMHRAMSGLGTLEGRGHGMTLLQLAFVFXSVLIEILVTHSNRQIDEMKRVYEQLYGHPLEKDIVGDTSGAFQRLLVSLCNDSRDESWSSDPIRANMTARALFKESEVESGVNDVLFNQVLANENFIQLHLIFEEYQKVSGHPIEQAIQQQFSGDTRD

SEQ ID NO: 163913 - protein, 245 aa, Heterodera glycines
GNFKEPVAVFYSAEIACGLFYLHSKGIIYRDLKLDNVMLERDGHIKITDFGMCKEGIQGDTTTKTFCGTPDYIAPEIILYQPYGKSVDWWAYGVLLFEMLAGQPPFDGEDEDELFTAITEHNVSYPKSMSKESVLICKGFLSKAPSKRLGCSADGERQVKEHCFFRRIDWHKIETRQVQPPFKPKIRSADDTSNFDSEFTGEAPKLTPVDRLFLMNLDQNEFKGFTFVNAEFTPQGENKTADKTI

SEQ ID NO: 163914 - protein, 144 aa, Heterodera glycines
ACLVRFPPPPPSLSPPFSRQTFWCHDPGTQTLRRPPTILSLRHSTQVASRPLLGSRQTLTESSAAPFRLSTIHHSSLPPADPLGSRQLNPSLSADHLRPPALITQLKSPAALLGSRQTLTESSAAHFRLSTIHHSSPSRQPPFQ

SEQ ID NO: 163915 - protein, 302 aa, Heterodera glycines
MDQNGEGGALLGTDKQSVFRDRDDDNIAQQQDSTNPISQNMVSPKKRWTSALRVVTAMARFRNMPRHPNNQQPADGATGNMNSVETGKCRTASSSFSGSSESVPNSGGRNYDEAHEKESESNIDPVYLALKEATEKYGNKAGKNRRFSQNIGCGGAGTGDSTTTPSSCSRNLSQASLLDSGTFSVSGDYGGIGISSNNASSTRLFVSGGSTSQLEGGLFSSAPNTASGRGDRIKLTEKMKSFSLDCAEPPSAADQHQQKHGIAGVYPNYRMKQLRSPRTHAESFDQCMKRSSSPAAATFFAG

SEQ ID NO: 163916 - protein, 198 aa, Heterodera glycines
MEWYSGDVTTALNIYQEKKGILIVYVFSDDVNSTKFDQIWDSFDHSILDRVPYVAIRLAKDTEGANQFAQFFPTPVFPVCYFLGLNAQPLEVLTAVEQMTIERLNSSLAKAISLYNDQMKEQGFATDAVSFQSKSSENDSGKNTSENVPEPLNATSNDEKLEYYRKRLEEKHKEDAMKKEQEEREKEIMRRNEGKALA

SEQ ID NO: 163917 - protein, 233 aa, Heterodera glycines
ELDCHSERVPNLIKTGHHLIGTGHICSKEIGEKCDQLEREWAKLTKCAALRGRAIGEALQREHFLFDTAEAENWLTEKQRHLILCRESLGTSEGAKKMLACANTLQNEIVPWRKAFGELRQRGEQLAKRGHESVAERMERVENQAKALEGMAKEAARGAGSVLAVRSFLADGAELEEWMEQQKQTTNIEECGNDLEQCEQLRTKFEEFRQSLRMGDERMAKVEELFRTHKPRR

SEQ ID NO: 163918 - protein, 289 aa, Heterodera glycines
SADDHQTASVLPRLFVLMAKSEDPAHLERASRMMEVGQSHWKALLKGEELSVRKCRQRPTAKSFSQLSSDSLNTSQFYQLIAKHFCEEFPQQICLGLFVLEKNAILDIFALIGAEWHIRRPFFQNLFSVLFNLQNEGDRQPIVDALVEFEFFASSTGGHSPSADELVFILSLLSDLFQQFATLKPLLLPRENVEKLFNLVFVRMLFQLISTQRKIPSDYFKAMKLFFSLQSVRNFYSENDLYTVRSLQQFLTAFWEHLEKGIPRWHRLHIDRQHWAVKVHNSKELGDEF

SEQ ID NO: 163919 - protein, 256 aa, Heterodera glycines
MTTAVSNTNAQQPNDATVPEGVDPAFLAALPEDMRQEVIRDHLLQQQISQADNTTARVDADVPPVERIAAIMGMEIPEGMDPAFLAALPDDIFHEVVRDHQRQQELARQRRAQIQAQQQEANHAMVRHPHIHHRHFAMPRFLSRSIRPHTHRELPSTSAAAATSSVERTVPLLDKESISTLLVLFLLDQEKFDTVRLQKLLKLICIHPGTCDFTIWALLSMFDGLDKFKSVDGSEAPADGGKFQFGWINELRLQNV

SEQ ID NO: 163920 - protein, 490 aa, Heterodera glycines
VSLKAGGDLSVGCQWPGSKDEYELQDAIGVGATATVFKAFCKSKNEMCAIKSINLEKCQTSVDELSHEIQAMSLCSHPNVVNYYTSFVVGEELWVVMRLLNCGSMLDILKRKIKAIGKDQAAYGVLDEVIIATVLKEVLRGLEYFHNSGQIHRDIKAGNILLANDGTVQIADFGVSGWLAASGGDLSRQKVRHTFVGTPCWMAPEVMEQVSGYDFKADIWSFGILCIELATGTAPYHRYPPMKVLMLTLQNDPPSLETNADRKEQYKAYGKSFRTVIKDCLQKDPSKRPTASELLKYSFFKKAKDKSWLVHSLIENLGSAPSIPTIPKKVASGKLKKDKDGNWEFEYDTSDEENSPDPENATIQQSASGERPTVSRASSEGKGEEQMPPLQTLNLVLRVRNQQRELNDIKFDYSPNADSVDGIAHELVTAELIDGHDLVVVAANLQKLIDLAQKKAERRTITFALNSGVASNEIPDERSLTGFAQLSLLD

SEQ ID NO: 163921 - protein, 397 aa, Heterodera glycines
EAVETVGTDGHRTSPPSWQEPSGHQPTSSASGAAHALPPSSSNRPIRSQRTPMKEIITLDDPTELDEFMARGEEQCIHAMRAFITQFSLRQTTVATMTGVSQPYISKLLNGNHRELSLRCRKNIYCWYLNCRRHPEKLAMFVQDPCTRLETSAEGELVPQRRERYVFRPVLLRVLETYFQKCPFPDIAKRVEIANACNAHLQVDKRGVQLMPKEVVTPQVIANWFANKRKEMRRRMGGTEAGRSRLNSLSAGRSNSPSSPNSAAHSREGPFELRQNNQQSGNVDEAVLAHCEQLQAMPMSVPTASNQQQMLLISDQPESVPSAADLALVLPPLGPPHHPNCCPPATPLLPPNVVQFCPSVDQQLLHLLQAQPVANQLLFLQQLLVGTSSADNDYLKQ

SEQ ID NO: 163922 - protein, 115 aa, Heterodera glycines
MVDDFLSKEITLLEGIGLDKAQLLKEELGIHTFKDLLEYYPFRYEDKKTLFTVSTIASAPASTGIPLQGYIRNVQKIGRGKKRLTACFQDSTGQLELVWFQNFSWIIKKIKPKDI

SEQ ID NO: 163923 - protein, 256 aa, Heterodera glycines
MMIIGDQYGFYQLVLRKHACRLRYILHQLNGGQLSLEDLKRNIEYAALVLETAYMDETRRICDEDDDLAEVTPEAVPDEVREWLTATFTRQTVQSRKEKPKFKSVANAIRTGIFFEKIYRRTQSVLAPIPHEYLPFLRQVNNWNFDSFDLNEATNGNSLKYIGFELFNRYGFFERFKVNVQVLENFLLALELGYSKHNNPYHNTIHAADVTQTSHWMLSQTGLASTLTDLEILGVLFGALIHDYEHTGHTNNFHIQ

SEQ ID NO: 163924 - protein, 322 aa, Heterodera glycines
MFVALPNCSSPRNPLATYPDCIASLDINPDSQTYGKLISVLEMPNEGDELNNLCCCSSDRLIVTSIGSGRIYVVDTSDPKELKLEKTIEPSTLTSLGVSCPGRVCCASDSVIVGTMGDDRMENNGNFLLLDRLTFEPIGFWAEKEGQKGTKFGGTDFCIQTKQNVLLSVGWGTPAKFRGGLRPRDVTNGHYSNEVNVWEWRQRRLIQTIALEADCGWMPMAVRFLHNADKCHAFVCTLLGSAIYHLWREEGEESFRHCLAAHIPPKKVDGWQCPSFVPQFVQDLLVSMNWALPKMPAFISDLVISSDDRFLFSSNWLHGDVR

SEQ ID NO: 163925 - protein, 39 aa, Heterodera glycines
MRIERARFDEVLVSQKKKSKHLKIYKKFKNENSCEIFWK

SEQ ID NO: 163926 - protein, 384 aa, Heterodera glycines
MIILSLKLLTLPVLLSILLCIAKGQSVEELCEKHENEFNELFVEKKGGAVPEVLWEESLEKKEDKEEEKERLEEQKKTEKAKEKDANAKNVSWLRTLLGNYLCQKLRKKDGEQKKSQNVPKKLSSKTPKVSVPLITKKDTDDKSDKRYEAKFAVKSEEEIFEKIRDKFNISDEQLLLSLSELVPLNGRGGSGGVFYKTKDDKFILKSLNPDHDEPAKIDEVLDNYSKHVLGQQPEKGKQSTDSRSMMNTFFMYFEMNVYAKLKEGKGKERKKKLRLHMLQFVVLNNVFEGIDEQTLLKFDIKGTFAPGSAVQHDQKQKWYTGETGWQKSLYREYDFIGISREGREISAFFPEGIQLLPEAYRQLADGVKNDTSYLTENGVNDYS

SEQ ID NO: 163927 - protein, 217 aa, Heterodera glycines
  unsure (1)..(217): unsure at all Xaa locations
MTNNLDETNPLVEQALNVIKILHELSRSISNFDQIIGVEVTFPTLPEESFHSTKLSQKLCQELTDPLVVSAKALPNWCNYLVHNFPCLFSMDIRTSFMNTTAFGTSRAIAYLQSRRDHLLDQNRSATSSAASNMAGLRREDHYPEYRIGRVKHERIKVHRSAELFLENAVKVLKFHALRKAILEIEYFGEEGTGLGPTLEFFSLVAAEFQRRXLCMW

SEQ ID NO: 163928 - protein, 95 aa, Heterodera glycines
YEARIHQFAVKNLIATADVGFHIRLGPLSDFLGAKCCSFTPELFPGLVYRNQNPKISIIVFSSGKLNLTGSRSKEEIDFVFNQFYQIICNFKYSP

SEQ ID NO: 163929 - protein, 116 aa, Heterodera glycines
RTTASSITTTAVSSSIVSTSSSGERGADNERGESGDGLSGPSSSASSAVAKVSSHSMMAFPSQSSPTDSSTKSNSKRSVNSFSSAFSFICFGDDASVLTFADIFNGKAMGTFNQTE

SEQ ID NO: 163930 - protein, 253 aa, Heterodera glycines
IKTQKGHLSNRGFGFIQMADLEAQKRVLKHKVCVSIAFFDLIILLQFPLQSHIIGDRECQVKVPFSKNALSSKIFVGRLQEGVTPIELKKRFMEEAQRIDPDSSVTDVYIPRPFRSFAFVTFSTPIVAKELIKIGQVDFKDTSVSISSAHSTRPQDSTVHSVHHHSSFIPPHPHNFVPEDDSYSTSELYSNYGTNTKWEFDEMASMAMPKHQLITSTPGIQQSRTAGPMFSGSVQQHLNQPFSAHNQQHPPIA

SEQ ID NO: 163931 - protein, 260 aa, Heterodera glycines
PSIYGITDETYQLIFQPIMRKVMEVFQPSAVVLQCGADSLNGDRLGPFNLTLKGHGKCVKFFRDCNLPLMLLGGGGYTPRNVARCWTYETSLAVDIDISDELPYNDYFEYFAPNYRLHIDASNETNHNTEEYLRTVQNSVLENLSNLSHVPSVQMQPIPRDGMQIDESVEHDRANPDRRLPAEVSDHMTAHPGEFYEGENEGEDRRNRQEYKRRGGNTTGEPSDSREDKQDNSKRIKIEKQPKAEQQEDGELLEEDANTN

SEQ ID NO: 163932 - protein, 235 aa, Heterodera glycines
KSRNTCLRLAITNRIRIFNHFCRLFYQLPNHMIPRLNSIGEKNREKQLMIQLPRQDLSIAYCKHLKTPQERRLYDEFVNARNEVALDIGFINSNVPKAMECRKCRGVIERNEMAIIAPKLGESTGWHAACFTCNTCDQLLVDLTYCVRDEKVFCERHFAELHKPRCSACDELIFAGEYTKAMNKDWHGDHFCCWQCDSQLTGQRYILRDDHPYCIKCYEEIFANVCDECQKHIGI

SEQ ID NO: 163933 - protein, 270 aa, Heterodera glycines
LRDCYVIFLSKFLCLENDKKISVNNRSLPQQNDTFLQIEQCVREMLLEKESRRDLFHCSLRPALGHFVALLLHSFGNDSDVNLRLRSGEFLCLLTQLDFADESADFVAFVLPGVFSGCRQILLNVLPNLHSIDLVRCACELVTNSICISFSKINVTDCLSVSVGKCVKSPSSENVLSFRRDSNWLQTAAQRILPQICSLLSHLSAHSVDSVRYESANILSKIQRQIPSDYFGSSFVKMTIDVSLLLYSDTMPKTRHLAHRIIDDVRLQQK

SEQ ID NO: 163934 - protein, 222 aa, Heterodera glycines
MKSGYQRELTYRRPDNSFSAFGESDQHGSTWLTAFVLRSFKQAQAYIFVDDRVLEDSIAFLISQQLDNGAFVERGEVHHKLMQGGASEGGFTLTAYVLIALVENHVQNKVTELARSYLESHLTDFKEDPYALEVCTYVLHLTNSPKKGDVLKMLEGLQITGATDGMVHWTTKVSNGAKDGTGGAAKNGGGAARDTNQYFFQPQPADVEMSAYALLTYMLLDN

SEQ ID NO: 163935 - protein, 144 aa, Heterodera glycines
  unsure (1)..(144): unsure at all Xaa locations
MSKVLSPAFRWRHLSLITFALLIAAHSLLAFRTQSAGARGQXLCGGRPARGVLVKLFDEDDGPDPDDELDTVYTDLDGRFEVSGSTMELTNIDPELRIYHDCNMHIPLCKRRMXVLAFPDKYIASGTLAKKLMNLGSVELEAEL

SEQ ID NO: 163936 - protein, 244 aa, Heterodera glycines
ISHFIRGLFSPFRAQITFCVSLLKLPTYNKMPMPSFPSASSPCTSSSSSSRSVDEHPLQSSSSSPLSSPFSATMPSTPFKQSTFGTSYKSTTKGQNAKKEMPLAKDKKAVGGADKERQLDEQSEFCGIFCPRSFGRAIGKFLDFVMGSAHSSANPSSSVSSCSSPTNFREKHTPDSLEDKIELIFELLEKKPTRLGYSIQWAVQLLANATEEEKLEMLRCRVLSRICALITRYSNVEVAAPPGT

SEQ ID NO: 163937 - protein, 209 aa, Heterodera glycines
MDSLNREIKDRVRDSHWLGSYGDSPHATFSDIVMRSFDEVKKSGRNASACRFYDMYHPEIGILRKSKSYSALAPTNAMRLKDRLVAPDLRPFHPYKPKRNEWKTELEKLHHGTHAKLNIAPSPFLPPLPPTSRRPFQVPADATRFENFCMYWGGRARGLDYSEPFLYEPQRDNYSIMEDRRYHRLYWAQHMIPSQPSARHGRQIMLSAY

SEQ ID NO: 163938 - protein, 138 aa, Heterodera glycines
MLTSTFPFIHFCCCPSLNSCLFRGPVLLPDLAGMLLRFRCVVSSPFILAATLRHHLQQFDSPLSREISESIYVDNVLIECETVQEALEKYKFSKDFLQQGCFNLREFISNSKVLMKQIPQEDQLDKPKAKVLGLPWDT

SEQ ID NO: 163939 - protein, 270 aa, Heterodera glycines
MPILRPNKKNGPSLDELHLADGIGAECFADGTHGERRRTSRHQIPSVSMEKSNLPSNKNTWRTPSRLICNFEESILNGRIPANSVVSGFRLQLTVIGNGVSTDNRLSFPASKRLTLPVLTYFFNDLMSQHSGRFPVAVPPSPLHLARCELAAETVPIPKRCTLQIVLLRPCGSVVKLFMVAVNVLDMPSNSRTFIRQRVFSGDSAKGTGEKERSGNENKTGGSTNVPNAKPCSNSLRFLIHLRLASDSSGKVYLHSDIRILFSNKSKDLE

SEQ ID NO: 163940 - protein, 232 aa, Heterodera glycines
MLSTADDLSASSSSSAASLESKDYWVKKCLDLAAAKNAAEARVEQLKQRNAELELENRQIRESKVRMQVRVEQEEEYISNMLLKRIQKLKTDKEQLAQKYEQEEEYLINDLMRKLTQLEGERDELANRLSTDQSWVVANLLQKIRKLEAEIQNNHKSLEQLRREKVDLENSLEHEQEALFNTLGKRMDSLEAEKRRLQGRLDELEGGGTAATVATTTTTVADGGGGVPTNAA

SEQ ID NO: 163941 - protein, 88 aa, Heterodera glycines
SRSWSRKVRGIGKDEKEEKLEGKSADEEGEEEEKPEGNGAGEEEKPEGNGAEVDGEEEEKSDGNGAGEEEKPEGNGAEGGGVEGTNGG

SEQ ID NO: 163942 - protein, 111 aa, Heterodera glycines
MQGSSARSFLNPKKKLQRKEDLEKEFVESGEKDRVQEVVERRLHESGWAKRVESMCEEYIAKKGYERVELQAMVDELKDASRRIVPDEVKRELMQLIQEFVNSRTSTGEGW

SEQ ID NO: 163943 - protein, 85 aa, Heterodera glycines
ALTVPFYGQCSDNPHHQSFGGGTAPTRASTGGGIGTVSLGTVTYICGDCHKENEIRPKDPIRCRECGYRILYKKRSRKMMVYDAR

SEQ ID NO: 163944 - protein, 86 aa, Heterodera glycines
MASTGFSVYVGNIPYNTTEADIGSMFSSCGVVTNVRIVYDRETNRPKGFAFCEFQDQQGAQNAVTNMNGIELNGRPLRVNWANTNK

SEQ ID NO: 163945 - protein, 255 aa, Heterodera glycines
PLRPGDFCTSAINERLANSLLAYEMDADSFLLFYIKQRIERGEDGLQWYNPPYCGEDEEGHVPDNWRTIQQAVLYFEKDNSDEIEHQLIDQLVQHSAVKFSAFKYLVDAYFGLLQRRIERKADNFGCPSVTNLCVPFLAMIAFTGLFARRLAEMDASARVTEEQQDRRDFRREIYQVSIYGSTMLRYKLYTFANNEDSTAAYSWDRFCADSLQLVEHISSLKERETSIALPSASPLLGVVLCGIAAAAVVYFLIA

SEQ ID NO: 163946 - protein, 274 aa, Heterodera glycines
MSAKPLLELYVKASGIDSRRIGACLFCQEFWMELYALYEVGCVRVEVKTVNVNSEGYKKHFSGAQPPIMVEQDKGTANADNTDIERRIFQLCNEFHVPLFEKDPEVAKTIQDLYRNFKIFLQAKTNLDKGKQQPSSIEGLPPQVASSHSKLVEQLANINQLLAERGNTRYLLGETMTEYDCELMPRLHHLRVVGERLLGFTIPHQLTHLWNYVLTSYRTAAFIESCPADQDILHHYKEQLNLSIDVRVTLEAATKTLTIPEGVLNDIRRITNGN

SEQ ID NO: 163947 - protein, 254 aa, Heterodera glycines
MSQGKPHLSIVICGHVDSGKSTTTGRLLFELGGIPEREMEKLRAEADALGKSSFAFAFYMDRQKEERARGVTIACTTKEFFTDKWHYTIIDAPGHRDFIKNMISGAAQADVALLMVPADGNFTTAIQKGDHKAGEIQGQTRQHARLLNLLGVKQLIVGVNKMDSDPAGPYKKERYDEISAEMKDMLIKTGWKKEFVEQSVPVIPISGWMGDNLLKQSTNMTWWKGQEVVHPNGSKHTIVTLLNALNEFADLPSR

SEQ ID NO: 163948 - protein, 154 aa, Heterodera glycines
FVEGSCTTCGYTSYHLERAAPAPPPPPPPPPPPAPVYSQSSYSSCSTCGGSSYSSYPSSSYSSYPASSSSYSSYPASSSSYSSYPASSSSYSSYPSYSSSSSCSTCGLSGYSNSWNNGGSSSNTWSSGGSSMSAGNGGGYGYGGGSCSVCGKRK

SEQ ID NO: 163949 - protein, 165 aa, Heterodera glycines
MEVGIERMESDENLENLPKVDWTITPEPIVIRGVGHLTLFGLNSHFPTEFPSALIGKLAPEEFDDTLRRVNYVLQRNVSRNLRWLICGLLFCCCSFGISLWPVVCLNRRTISALEKTLDHENQQLYDKLGLHWKLARLPVEPSNRLTEYVLLLETLPRIPLSMPD

SEQ ID NO: 163950 - protein, 242 aa, Heterodera glycines
VSLQAEREYITRRVLTFVELKETVCAGGDQGFVVINQKGIDPPSLDLLAQHGILALRRAKRRNMERLQLACGGEAVNSVDDLTPDVLGWAGSVYEHVLGEDKYTFVEECTNALKDGAVLPGAGAFEIAGYCALKKLADNVKGRAKLGVLAFAEALLVIPKTLAVNAGFDAQEAIVKLVETFSAAGELVVLDLESGEPCVPQVVWDNVCVKQASLNACQNIASNLLEVDEVMRAGMRDLKGGQ

SEQ ID NO: 163951 - protein, 238 aa, Heterodera glycines
  unsure (1)..(238): unsure at all Xaa locations
FVKGAGSLMALAKCPXKTVQILGAEKALFRALKTKKDTPKYGIIYHAQLVTQAGQKSKGKIARKLAAKVSLATRVDALCDESLGNGQGIEARVYIEQAIKKADARGGPKKQRFSGVKQAPKGAYTFKKGEVHHYDAKFDMTLKKGTEQAEEPQQEEQQSGKSKKGDQTKWRSEGETGGRGGRNGKNTQQKGKGAKRRSNWKKTAGGRGGTQPRKRQGKKAGPTPQKSRQEGPKNKTTK

SEQ ID NO: 163952 - protein, 276 aa, Heterodera glycines
MASVANSTNSLCSQSLALPQKIRISAHGKEDQQQKRQQIPPSGPVEDGAYKISQQQHFVLHLPAESASFDSTGQQTLAVDASSSDSVPLFYLFDQQQNHPLFSAGISSPSAVQHSQTVPVQLLDVNDETVVPVNGAVIPSPSFIQLSNDNRPLLQMSNGQTIELVSANGFHFSDGVQNVEEVSSEGTSSSCGGSRLTHNYPPTTLLSTAKVFSPQQSEPVYVNEKQYARILKRRAARAKLEMEGRIPKQRRKYLHESRHRHAQNRARRAGGKFDSG

SEQ ID NO: 163953 - protein, 176 aa, Heterodera glycines
MALSILALLCLALAHFGTGQEKKTEPLDHKWTCGTTWKYENTGLTVSWSLPEFLAETSVDVDCPSRKNRMNNCCFDHDDCYSKQLGQTKCDDVFCDCLERATKGSSRCETYEGPGFCHLVRTYGASAYRASAPPFWSSCGTVLNSAKYLGCPCGTYKTWERCGFLYMGYRYLCYAC

SEQ ID NO: 163954 - protein, 229 aa, Heterodera glycines
MSMSSTSAASASATDAEAQVEFPIVCEPCLGTNPYMRMTRQPQGAQCKSCSRPFTTFRWSPGPGQRTRRTEICTSCAKLKNACQSCILDLEFGLSTRVRDAVLGLDSGANTSNDHNRQWLLRAAEQNLAKTGSGMVDYGKVESVAKETMRKMAKEAASPYGGGSGGSKRPPICSLWLKGKCPRGKECSYRHELPKNKEKLAEFLAKHQSTSPASTPAPLAPAAPGARAI

SEQ ID NO: 163955 - protein, 150 aa, Heterodera glycines
  unsure (1)..(150): unsure at all Xaa locations
MIASNSAGAPYRGDPMASAALGFSNFVNGALIRHPFVVLRRQCQVHDHATPKHLTPITLLPVVVNLAGKDGTXRFWKGAIGSGVLWVVSHASEFLIAQLFNLPKSFVPQGSSERFWRHVFLKTASFLACTPFIGSSFIETVRSGGRLSDE

SEQ ID NO: 163956 - protein, 234 aa, Heterodera glycines
FHIHLQKERSFAEPRPRGYAAQVASALGYLHAKDIIYRDLKPENLLLDRNGHVILTDFGLCKEHVKMRQTTSTFCGTPEYLAPEVIQKKPYDRTVDWWCLGCVLFEMLFGLPPFYSKNQNEMYHKTLTQPLCVPSSASTLVRKLLVEILHKDRSERLGAKSDFEEIRSHPFFAPIDWDKLLNKEVKAPFVPKVRAETDTLNIAREFTDIEPNPASLVPLQTFVNRETEFAGFTY

SEQ ID NO: 163957 - protein, 223 aa, Heterodera glycines
MADEFAKPKFDGKIFQNPDSFTTWKNPPSAGDPRSWRDFIKWKWDAKSTKLPNLKVLDQTLPVLKPRFQTDSRLSATWLGHATLFVRIDGISVLTDPVWAMFATPSFLPFFKFCPRFRPPPCKIEELPKIDIVLISHNHYDHLDVVAVRELAQHFPHIIWVVPLGLKQLVQHETNSKAVHEMNWGDRLELQLNERTFEVFSVPAQHWSQRNLIDRNTSLWSGW

SEQ ID NO: 163958 - protein, 66 aa, Heterodera glycines
GIFVTGVVTCSVNAWSGVRGLAANSEYWSNRPKRRLSRCLMSDFVFNGSQSFFIICLFNAMAQNPS

SEQ ID NO: 163959 - protein, 283 aa, Heterodera glycines
MANFGYGQQQGQAYHPQGANPYQQQPGWNVPPPPQGQQPYNAQHFAEQGQAGMPKNELGFNDQTIRSQFVRKVFSTVGIMLAVVAVMSAFPFMHPPMMAFVRHNVGLYLLGYITFFVVYIALICCEGVRRSFPANIILLGILTLSIGFMTMMITAQYAVHSVFMAFAITSLSCFGVALFATITKRDLTSMLGIVFIATMCLALFGLVVIIVGMFTNVRILFVVYAAIGAFLFMIWLAIDIQMGMGGRTYEISPEEHIFASITLFLDIIQIFWFLLAIFGDRRN

SEQ ID NO: 163960 - protein, 93 aa, Heterodera glycines
MASAVNPLKAFGQIGARLGIREKKNQFVQKAWPYIDPGTHFGKKNFGYLVSAVSFLVFYKVSSNIKSKKAIEAKQKLEMKPYVVQDAMTRSGI

SEQ ID NO: 163961 - protein, 99 aa, Heterodera glycines
CLLLVEWAFQGFIYQKLMQGRDSTYRYFGKAYYIKFILNVLCHLVGWAFTIHSVLYPKFETQLVRHLRLKITGTVRLERLETRSSHVIQLQKQNRWLIT

SEQ ID NO: 163962 - protein, 377 aa, Heterodera glycines
MTFFLQYNFYLIWQSDGEKNMNKSQLDPSQRKGLDIDGHSYGVHFYSLPGMSSLTSFDWHPTISDRLALLPVQEKPMAFAHSIASTKRIAIIKLRDDVNSVIGPSGDFCISAGPQLNFENGEKLLAKPNCTSDIDTETLFKRRVLAGYGYGNSLNALATLLEYSKKAIERDQFASDDLRFCWDWLWMQFQSADANEIKKNYGTMFAGVKHILKGTKSNSTIKQDEITYRNRIFVNEKRLKILRMCNWPNCAVRDECKARLDEIAAQNGVFGITRAAALALFSVHGMLSKEYLTHLSEFTHSREFAETWCRSPSFVTNYQRMADTVLNILQKYDGVRVPNYESVCEGLTGDDYLLAIVKFLARRDKIYNRIYNEIFES

SEQ ID NO: 163963 - protein, 247 aa, Heterodera glycines
MLHPSTHCARKISRKQYSNAPDGAEECGGNADALLRKASRKLSQLSELGDFQQRCNTATSRRRCSSTESLLAALNGHGSVVSAGADSSTASHRSSTDDLTVLDCSNLSLGQLPIELLTEHSEEIEHLILDENELDEQALEDIPRLDKLETLSLNGNKIKNIGVFLQYLKRKCPNLKFLSLIGNPGWPHPILNNNLQLYRTYALSAVRLFPSLQFLDTARVSSPASIAILGEQCQQRHHQQPNAGNKK

SEQ ID NO: 163964 - protein, 158 aa, Heterodera glycines
MGEEMDDDLSILHEMNCRSKQNGSSELDSKLFELSDEQLNYYTNCFLFLMQKSQGFFSLQGALQGNDRTILDFFRKSSLDDSILSKIWSLSDVNEDGFLNLTEFILAMHLVVLHTKGSVPIPSRLPSSVLPPTTPTRTLVHAEDDFAASLSNHSLSNS

SEQ ID NO: 163965 - protein, 138 aa, Heterodera glycines
MPNTFKILLIVLLAVVSFRLSASTGDKKTANDGSGNNSSAGIGTKIKRIVTAGLLFTSLATGGAEAIGRSNAQGGNAAGLVPSHVTNRSMAPPPPPVQFEMGANRLEKMRAHLRELAEKMPVNESKRLSPSGPDPHHH

SEQ ID NO: 163966 - protein, 143 aa, Heterodera glycines
LLSDLQKLSGADRLLLCRRYFHVGFVCLPLLWAVNAIWFFRYAFPSGANATAETAQIRRYVCWSATGALCWGLLLTGWLLFYNIQRSYGLFEWARENHRRFSPGLCLIRMKKNTMFFLILIVYGIFQNTENWQQSKKGNDKKK

SEQ ID NO: 163967 - protein, 206 aa, Heterodera glycines
MSSRINVVSVQLLENPATPSDHIKLEIVFEIFENIKEDVEWELVFVGTDGREEHDQVLDSVLIGPIQEGRHKFLFEAPPPQIHNLRPEDFMDVTLLLLKCKYREQLFMKIGWFVTHTYTDPELVENPPSQPVIEKLKRTIVGEDVRVTSYPIKWDEEAEQPMDDDEEPNAGNEVSYGVAAIELTSNGNSQQMNMSQQEQTPMAAVN

SEQ ID NO: 163968 - protein, 225 aa, Heterodera glycines
MKPDLKDPYFMYKLIVGQLFYDGHQQLALNLAQTLGLSLRPPPPSDKLFRLVAIAKQFVEDPEYKERETILQVGGFESAGLDLEFDADVVPTSPEPSLYETVYLTTHKAPCRAAAFSPDGALVATASNDCSIKILDVDKIISRIDVTLSESGPDAHHPVIRTLYDHLDETTCVAFHPRESVLLSGSNDFTLKMFDYSKTAGKRAMKTITEVKAIPAVSFHPSGEF

SEQ ID NO: 163969 - protein, 180 aa, Heterodera glycines
  unsure (1)..(180): unsure at all Xaa locations
GRXRRLCQFQCPFFPLQSNRHPSSRTTSSAALLMFPYNSFSTVRPHSISSQSSTTFSSRNFTQSDTEAEEEKKFQKRIVHRREVLTPSRMKWDWDRREMLASCSTPKSSQEDLLCHFRLLDKTSVYFRPKPSDDNQQQRHGNNKQRQKRAKCQQKQQQLQIDDYFNAIRRPKHLRGAKRH

SEQ ID NO: 163970 - protein, 57 aa, Heterodera glycines
  unsure (1)..(57): unsure at all Xaa locations
FFFFFFFXTISNYVCHLLLSLAHKLVIPITVVPFFSLSLSLSLLHPLPSLRPFRSLL

SEQ ID NO: 163971 - protein, 58 aa, Heterodera glycines
GSIHTHLFIDLFFFLNDLPHPSRKLFFLPPSVNLYPLHIFPILVTLVRSIQQQCFLIS

SEQ ID NO: 163972 - protein, 153 aa, Heterodera glycines
MTASSRRLQKELSEMRGNNSGAVRVLEVDESNLLRWSLMLYPDREPYNKGAFRVNVDFPTEYPFKPPSVTFATKIYHPNIDDKGQVCLGIILAENWKPATRAEQVMNALLSLIAEPEIAHPLRSDLAEEFQRDKKKFFKNAEDYTKKYAERRD

SEQ ID NO: 163973 - protein, 102 aa, Heterodera glycines
KKRWPRQLRMPPIAWAECFRQRLARVMGFTRHWRQLPDWPIVTATVLDLKSEWTDGGTDWSPTILMREGAILNSDCSKVHKFYGQWSDLFSFDAFWFLFTVK

SEQ ID NO: 163974 - protein, 72 aa, Heterodera glycines
LCFMCILFFRDFQIYNHCPIRPIPCSTKVRMLSLSMNVLITSLPFGFVFTLWCTISSNTANSIHSFVSCNIC

SEQ ID NO: 163975 - protein, 218 aa, Heterodera glycines
MLLRPCPSLPLLSNALSFVVHLPFHQQKTISTSVFALTVFDPRIFTEPIVSTEELNKPLPPNDKRNYMYLKPMLFDQTPVFYRDEIVDKMVRVFLMEGKKELSRVNVLSALEIVKRTQYEKWLNEKDEKRRAEIILDPIEVANRAILNCRPLMKLEKTIKAGTLYLVPMPISEKVAIFKAIKTMRDICRLKAGKKRNEKRPHYPHFKDVLASELLAAM

SEQ ID NO: 163976 - protein, 310 aa, Heterodera glycines
MDESLGNKRPNSTVKEDDSVSLCGSVATTAAGDGSLLDFGLDEETLAVESDTEFERKFFVMKEGSFPGKVFALPHPASRERALYLLNEHGELFELLRLDNGKRSFFFFDSVVANGSVHLFFPVHPFFLAIECLQRNASEHFLTASELLEDDDFPSLKELAKSVKLIDTLKIAANFENDNSTDSPTKNFKFRHNEQRLFIWLEERFRILKESLAANCDENDNCAEDEQCFGILADYLPELVAQRLKERLGIKMPKNKNQQKTKRILAEPIKGTEAKGARTFKRKLTKVLAEASKGSHSIASLFGSNKTDKK

SEQ ID NO: 163977 - protein, 170 aa, Heterodera glycines
MGLMFCKGPTMGVNGSASADGASVAHNEKELVDVCKEWFLNKPDWEKFVVGAMVVSLVLACLAFIWNLVTFCACFCHSHVMKPLPGLAGLTAMCLAVALTVFYMKNQQYIPMMKDKQFDNTEEFRKFIQKLDNDGNHVGYSFYMGCGAAIVALANSVVGAFMVCLADKYL

SEQ ID NO: 163978 - protein, 194 aa, Heterodera glycines
ALTTANTRTTISSADVSKAGKVTDKGGDSDDEAAEEFVPTGTFKPIVPLPSKVDVKSGEENEEVLFSARCKLFRYDPMDKKNKERGIGELKLLHNKETGRYRCVIRSDDQLCKLFANFPVLATMISRITGQKPNVRTLQCRDFSESSEGIDEVFLLKFRDQTTAEEFANKLEETGKRLGETPKEKEAAEKEPRQ

SEQ ID NO: 163979 - protein, 115 aa, Heterodera glycines
FELKMNVYFFGIHPEFFFFFFFTHSLHSLFTTAQNALIPSAATGTDVERCFGFLPAFVHFLVVPTGHLFIPISRNKIGANEKADNYQQKKHNETQMEHLEKAENYLKLLKAENYL

SEQ ID NO: 163980 - protein, 171 aa, Heterodera glycines
LYGREDGIYSVLRGCLSDFFDFPPSNGEEGCTWGLSSENALIATSEKGELVQNVRVGVNLCPAKEGTQCNSLLRPSVEYAQGKQQTDASTSAAGNAWPYSCRKSTSMVQCLQCSRYDWDGDCHWNYREYCTGAWCTKTIGYVNGRWLEQRGCAPFNPLNSQICTKVETNAA

SEQ ID NO: 163981 - protein, 153 aa, Heterodera glycines
MATTSQMALEPPIMVTQDTGMKVTVFICIPGMRKKGGLIVLLKRLFRVKSRDPFTLVSNVKFGQYMLTDQSISLLAEVYTDKTAMDKRSEDRKRYEWSVTKFPSQINSESAEFTVEQNGDNCYIVMSCMKTDNYSTNWKDFLSANGTLDMTKA

SEQ ID NO: 163982 - protein, 137 aa, Heterodera glycines
PLAEFGTRVLKVEMPFSAPRQVLKYFYKRTNAFWDKSMLHKERVAYAKLRLKLYGALVLSMWYMYEFATPPPDVRFDIRWFFSSSFANYVQTKGAGGLDIADETMYKQFSFSKGRLLENALETPEGQAMGLSERFHS

SEQ ID NO: 163983 - protein, 118 aa, Heterodera glycines
METKRNNYNNIDSLWSTLCDLGYQTSQGLAYSVGMPNFSFGAFILLSVMTWCCFFMPPVAVFFRGYLRDGNACTEHVIYNIILCFFLWVPGMVHAFWYCFSDMFSGPKKEGAGYSKNA

SEQ ID NO: 163984 - protein, 121 aa, Heterodera glycines
MAESEMEIPDTMGERMEKHKNSGQPMMLHPDHPDNWDPRYHEKAAHLLWSAPYDARYPQVRKQRQCFEYYVDFFRCKELMGEDYKPCKFFQNVYKDICPSFWTEKWDELREEGRFPAKFDR

SEQ ID NO: 163985 - protein, 138 aa, Heterodera glycines
MRLGILLFVFRFSLNLIAKTNATYFYVRGELWCQGEPYVGAKIFLMEADTLDPDDLLGEERSAPDGRFEVRGGESEIGDEEPYLMVGHTCPQRGVPPDPACHFLTRVDLPNFLTHIEVPPIHLDGQYEFQHICGEDDV

SEQ ID NO: 163986 - protein, 104 aa, Heterodera glycines
MNSATMFTLLLIIGTVLALTIGMPTPGGSDESVSSMRQKRGYGMSNGGGMGNGFGGGMGNGFGGGMGNGFGGGMGNGFGGGMGNGFGGGMGGGSGGGYGYGKRR

SEQ ID NO: 163987 - protein, 210 aa, Heterodera glycines
HRQGGTGQRRAVERALRMPRRRLENFWRSIGMHSRSAKRQQCVRVAEQRIVRIAQSMHFLVFPTTNAEQTAVDKMGEVQLSKCAEQTAKIVDRVRVHRHSLCAGGAAGPSSFCCPSSFSSLSISNPPIAHNHNHHQQPKQHFHQQQQQQLSFISAPCALHSSHGPSTTTANAIPAQLFMLSKNGRECSKLREMVSSLGEQLNVPSTTKIS

SEQ ID NO: 163988 - protein, 242 aa, Heterodera glycines
MKDQAYLVGALDKVEKLAVRANDKTKKLEHDTLLKVKELLETKFVRQHEWNEKEIEVLNKHLFLTAKPIVYLVNLSEQDFIKKKNKWLPKIKAWIDENDPGAVLIPFSGAFELKSVELDPEARAQFFKDTGACSALDKIIKTGYKTLCLEYFFTAGKDEVRAWTIQKGTKAPQGAGRIHTDFEKGFIMAEVMKVADLVELGNENAVKGAGKYRQQGRNYVVEDGDIIFFKFNAGAGLTAAKK

SEQ ID NO: 163989 - protein, 289 aa, Heterodera glycines
RIWLRPKILYHNNDNLITFTHFDVDMALLVFSEAVDATSVMSLIGTTAHSLLAISPFSMAPQSSKWCRAKVWLASGGISFSPSAGVFRAGSPRFVNTDFLTKYFSSSPSCTRTLPRKALTSLVSMCEELIAEENNPWEVSALTSARLALDGITQETFKLTEQNCEKLKQFDPQRSAMYDEMFDKVRIIHELTKNTSDTPEQSQLDLLMEAKSDRLNLNGIGLISLLHLRPLSGLVQELNLQNNRVTSDQITQLCSFAALTSLTLDGNPIDRLPLINPRWFPRLEFLSLA

SEQ ID NO: 163990 - protein, 227 aa, Heterodera glycines
  unsure (1)..(227): unsure at all Xaa locations
MIGGILEDIWTRFIDLVEDISDQYDDSEQPTIIHHEPATPTTMFDNYGPIEKIVVVGTGLMGSGIAQIAVESGVKVCLVGRSQEKCDQTRLKINTGVQKSIKKRMANETAEAQQQLVEATMESLELVTNLDEAGLSDADIVIEAVVENLKVKQKLFTELEAKVSEKCLLVTNTSSFLLEDVSCKMGAAKREQFGGLHFFNPVPAMKLVEVVPGNGTSDAAXEVLANF

SEQ ID NO: 163991 - protein, 231 aa, Heterodera glycines
MTYDEDYMSSAFLAKVEDVKPGVGTGREGRRILRINANREEAIERQRVEKPKSKAELERDRLMEGLNNPIRAESKGFQLLAKMGYKEGMRMGRSAADEQQMDSRTKEPILIQLRIDRSGVGMDEHRKEKQRDLCEAHMERMKRQADNEEELAIDFRRRKRAAMEMKQLISEIQKLRKTCQEMDMRMGKTIPDEFWFWPIYSNNNELVDMVEVVDKSNQSMDENKRTKREPS

SEQ ID NO: 163992 - protein, 318 aa, Heterodera glycines
  unsure (1)..(318): unsure at all Xaa locations
PQKLQLANKYRRPVLXIAEDVDGEALTTLVLNRLKVGLQVCAVKAPGFGDNRKNTLKDMAVSTGGTVFGEEASLIKLEDIQIQDFGEADEVTVTKDDTLILRGKGSQEDVEKRIASIQDELDASTSDYEKEKLNERLAKLSTGVALLKIGGASEVEVNEKKDRVTDALCATRAAVEEGIVPGGGVALLRALKKLDTLKPDNDDQKSGIKIVQKAIRQPISTIIANAGLEPSAIVEKVLANAETNYGYDAMNDKFVNMLEAGIIDPTKVVRTALQDAAGVASLMATTECVVTEIPKEEPPMPAGGGMGGMGGGMGGGMF

SEQ ID NO: 163993 - protein, 121 aa, Heterodera glycines
LIMSLLFSLFSSLVSDLLKGLMKLLLFFEQWAGQCQYGAEKTVTFVGVSLRSFVCPSNNRWVSILERRELKTRRNNLLIFSIVLLLWTFQSFCYDSFQISKLSPKILKHKLFSNCTLTQIN

SEQ ID NO: 163994 - protein, 368 aa, Heterodera glycines
SITNSQNSPAYCVLAYDHGDGVLREIIDHLGLLESGGLGAQQKKIGSETLPCHTLHLDTKYYTCDVPLLSCHSFVRLKSICAAERRSNLSVFAVLFCVTRQQLTEDFLALVSQYSASLEKAEVKALVLRDDQTEEATTSMNTNDEVLNKFALSRRIEIIKIGRKTTNVVDDDEEEGLVGIPRIVESIETVCWPNMKLKPNPVKQREHPTRLEKYINSEACADDTAVFDMFPHCADDFAPGIASHRVNQMPPEKDKAANIEPTGSDYPDSEDEMAILEWFDKPISEDILNLSNIPPPQNKITNLQPARENDDDDLDINAYICKNMNELRIGNTQRPLMARVDVNEGITYDLLKAISSSCNNNKRGDSNK

SEQ ID NO: 163995 - protein, 325 aa, Heterodera glycines
MSNIHTLGGDDDNKSRQRSNSSDDENSDEGRQGFFVGGSDHSGQEVLGPNRNENISADHFFDAIRRAGAERITQEQNEALNMPRQTGGGAGQSQVAFRLGGHGMESERIGGTSATAGGTTRQQAPVVVRLVFWNNGFTVDDGPLRQFQDPQNREFLQAVVTKRIPAELTMAAPGREIDLRIEKKGTEYEQPKTKAFSGQGNQLGTITPNVGGSADVVFVDAPPKLSAEETAKLVEQAQAELKVDDNLPTTRIQIRIPDTARPIVARLNQGHTVNQLRIFIVTADPSLAYRPFRLMTSYPTQPIDDEGLSVKDAGLLNATVLVKFE

SEQ ID NO: 163996 - protein, 74 aa, Heterodera glycines
ESGAVRRNLKNSSNRKIIFFFFRGESIFCGQVGAEPSFFRRRGRFLRRVRRVGTCEFRTLWRTSKFYINGVMSD

SEQ ID NO: 163997 - protein, 245 aa, Heterodera glycines
  unsure (1)..(245): unsure at all Xaa locations
MFRQLFEAKSFTXSYLLGCTKTRQALVIDPVIETVERDASLVHELGLDLKYVVNTHIHADHVTGSGELKRNKYFPKAISILSGKAGGRADLLVKHSDLIRWGDGLELEVRETPGHTNGCVTLVCHSNQMAFTGDALLIRGXGRTDFQHGNARTLFRSVKSQIFTLPPDYLIYPAHDYAGRMVSSVWEEKKFNPRLTKSEEEFAAIMENLGLPYPKQIEKSEPANLLCGISELMDDALRRKVFGEK

SEQ ID NO: 163998 - protein, 207 aa, Heterodera glycines
GNLFIHSPSMISFRHSVNKCLLPQITNRLTSNLSAMCLSTAAADNKVVSKYDDYQKEMRLKQIERAFDEAMPKLLHGSYNNLMAFLDTNSFRFEDKVWLFESDSIHKTVFRMAKVRLYLAFKSPHNRFETLGTHICLDENLVTLIWQLSWPKDAKSAYLLSPKSLAANFSATFTGGPRSQIGRIEHKLATSESSDRPPSNATTQNGR

SEQ ID NO: 163999 - protein, 184 aa, Heterodera glycines
GCFFMYPPKDSDSNFFPNRMLSVDRSRSSSSHLVGLNAALQGCRSDIPFMLQRVSFSKDIKLHRMLRYLRACFVRDIREHNRGFNNGTQQTTKCQPEMIDQTNGVLNKRSWLEQNAYFAENNCFYPFYGQAVFYASFGQHSEGRVVCCSDGRIDEEESFKENCKKMTDHIYAAKAGWRKGKDAQ

SEQ ID NO: 164000 - protein, 89 aa, Heterodera glycines
THLKMVVLFRVGGFRCKGKDVARCSLCLIVHAFVGARLPSRPPFFSLISFVLQCHQILRVLLKFDVSLLLRVSSMCSPSSTSSSESFNS

SEQ ID NO: 164001 - protein, 307 aa, Heterodera glycines
MTRKRNRLKRKSKSVADYSGSNGFVPANGGGAVQKNRPDRRQILFWRSPFRTLLYFVLELVHIVWDFGGRLFVLRFLLPFLLAFGSLLFLFFVPGAHSSYVRHFEKKLLWCFYWLGLGVLSSIGLGTGLHTFLLYLGPHIARVTLAAFECNSLDFPEPPYPDDVTCSTDAMGHSSLVTLWTIIAKVRLESLMWGAGTALGELPPFFMARAARLSGHEPDSEEYREFIAIVERDATNQMNLMERIKLWMERAVTRMGFPAILLFASIPNPFFDLAGITCGHFLIPFWTFFGATLIGKALVKMHMQMLF

SEQ ID NO: 164002 - protein, 229 aa, Heterodera glycines
  unsure (1)..(229): unsure at all Xaa locations
MTTFLSFSVDLEQLEKEIQAKEAASKRDNVTDTKVQPDLKGNIGSGTSAQTKRKSNVVGLEEDFDTLDEPIWETINRDLKILYGKFSQVLFPAKSEQNVLTDWDLWGPLFICVALSILLQGADRGAQFTQIFSLAFFXSFFQALCVIGYCLLPYVFASVAIKSLSLLFWHKSSANLLLRALATVSGFAWALYASTLFLAGSEPPNRRFLFYYPLVLFYFVFSWLVISFA

SEQ ID NO: 164003 - protein, 263 aa, Heterodera glycines
MRRYLDTEKAVEEFGLREDLRAALENFLVESDIRSDHSLFTFLHNLLPYIMLLNVILLIPAALFFLRSTVSTRKLVTFLLLSTFCWSCYATYMRKYQEILAERFLRTDAVFRRGGGVCSPQGLLSEAFDVMLSYVRIKQKSECLKAYEDELIAPLWQVDPLQVIAEVLSNFFLGGLPASGTHLNLFFNNFFVDTPFHLALVKMLFAIAFPLAIAYAIYLYANCYTRKQQKNSEKEQRRIKPKETTRTAISRSNSQAELIVSSV

SEQ ID NO: 164004 - protein, 183 aa, Heterodera glycines
MIWLAMPKMDMTFPFHTSEFILLKEWLPQSIFAYLFSLLAVLALSVAYELLRVFRAILFQIAERRQSEECCSPVASAAPSSGAITASSSSVAACNCLSPQLFYNVPQWSFSSQLVSHFHLFQSLLHFIQFFLGFSLMLVAMTYNVPIFVALLLGHSLGYFLTAPLYRHGLAEENRTGGDCCCS

SEQ ID NO: 164005 - protein, 209 aa, Heterodera glycines
HLRALIPTYVLLFSHFYLLLVLAKGFEGYTFSCLDGCECDTDDEAIHCHNRPDRHFVQLPPSRLRGFTVLALTRNNIDVLPSEEVLLEKLPDLKAVDVEGNEHFDCSTLDHYRTLMVMSDCGKTPEQLEADRAKLPTDTQPNEDCDFECVANRRSRELREYVKHLWEMVKEKVSRLAKKHGLDKVVDDVGNFFNDVGERISNIKLKKKK

SEQ ID NO: 164006 - protein, 140 aa, Heterodera glycines
  unsure (1)..(140): unsure at all Xaa locations
SVPAVIRASRSLVDISILTTEEKGEELTDKTMLHLNTEFTWKRQKFKVMLPLPSKPQEKEAEATCNTVQQDRKYYTECAIVRIMKSRKVMKHGALVEXVIKQSQLRFVPDVQFIKKNIESLIDKYYLQRTDQNDEYEYIS

SEQ ID NO: 164007 - protein, 270 aa, Heterodera glycines
ISLPSKLNQKKSEKVVVSSVRMDRLSWYQTGESMEEILCQAGSVGIYDGDLKQTSFEQGTASLTYQRIIWADSTDPDCRLVLHHSMVHKIEKQHKTMFGRGGKIIVTVKPVTPGHAQGPIAASGTNSLRFVFRNGGEEEFYKRFLDALNKQMWQRTSSTSSSASSSRNSAQQTQTIVGSAGGTVAPPRSVGILGIEKRLAEQHQRTHEHISEAFEDMSKLMEQAREMVVLSKNITERLRQKKGEITEDETVQLKSYLLSLGVNDPVTKSS

SEQ ID NO: 164008 - protein, 254 aa, Heterodera glycines
MCASAALSAFAFLDDSEAEIDWDERCPIVYSEDYNISFFGIEKCHPFDSNKWGNVFRFLIASGALVESAVLRPIEAKKEHLLLVHSKKYLRSLNGRFTLTRILEVGLVLLFPICLIDRRILRPMRIQTGGTVLAARVSLIRGWAINIGGGFHHASEGKGGGFCVYADVTLAIKLLFANELIKSAMIVDVDAHQGNGHETDFASDSRVYILDLFNASIYPGDSDALKSVSRAVPLPFGAEDDFYLRRLEMELDAA

SEQ ID NO: 164009 - protein, 268 aa, Heterodera glycines
MPLSPRIGHNPSYHVVKEVEIIREVITSGGPTIQHDKIIHLLTSPNNAQRQELLHNYRTKYGGADLAQALKEKLPPSEVATNSLYLALLDTPAEHDAKYLAKAMKGLGTNEDMLIEILVTRSNAQLRAIKAAYQKLYGHGLEKDLAAETSGSFKTLLLDLVEANRDESYRTDLAKAKTDAEKLYKAGEGKWGTDEDAFIKVLANQNLSQLQLMFNEYEKLGKKHTIEQAIKAEFSGDELSALLAIVSFVRNGPIGEMAEMLHKSLTKG

SEQ ID NO: 164010 - protein, 106 aa, Heterodera glycines
FFFFFFFFLTVFIILQATKSTKERRIPVKNQRSQILRNYSIPLSQAQNAIIRLAHEAQLSTNGVLRRFAGNHSPSRLVHLDNLQLNRSVVFSRNDSRRRRTFPRDI

SEQ ID NO: 164011 - protein, 87 aa, Heterodera glycines
MAYANYGYGSYGYGGEDFSAGAHNPRYHYAAAQNAGFDLKTDDGLPRTIYVGNLDVSVTEDFIATLFGQIGPVTKTKVIFDSGSEPF

SEQ ID NO: 164012 - protein, 318 aa, Heterodera glycines
MSPIDPDKMALLKRLFPVLGKHLRKGDCGKIGVIGGSPDYTGAPYFASITPMKIGADLAFVYAHSDAAPVIKSYSPELIVYPSTDFATNRHSIERLDALVFGPGLGRQKHTQNLLADVVNFVRSKQNLCLVIDADGLFFVKECSQLFKGCTDKVIITPNHREFVRLYTQMFPNQQKGEDTDELKIQCEMAEQLAKHLEVTVMRKGEIDIISNGSAAQTRIVQAETSMRRCGGQGDILSGATALFAFWARKASDADIYSSEHLLDGAEAASLLVRNASLRTFQSVGRSMNAADVIDHIVPVVRDIDSELSAKAATITTR

SEQ ID NO: 164013 - protein, 221 aa, Heterodera glycines
MSDDLRKELEGLNLCAGRGRRQRATVVTESMIDDFCKIVYKAMLVTPEGYLYTSDIANNIYDDIGIDPYRRALDLGFNSFNAFLHSEHMKKYIEIDSTGNVLSYHAILTPELLLTIGHIQRERQTFLSMKRIYPSRRTNGFNQSQEMGPLQFLKERMQKRELQAQMGGQTQEEETQSETVQEPSFVMNEGQYGIEEEFFEEIGENEQLGLDRIKWVQNDSD

SEQ ID NO: 164014 - protein, 112 aa, Heterodera glycines
MFSTKIIVRSLSSSARMSQSHLGDFGGGAGKGGGSGGAVRDAGGTFGKMEAAREEEYFHKLKQQQLKLLKLQLKREQDHHEEQAKHHHDVVERHKKRIQELEEEAKDDAKSK

SEQ ID NO: 164015 - protein, 57 aa, Heterodera glycines
RNSFVFVLSFHLHRTTDWKMITDMQLGIMANVLGVSIFILVIFYHYIVANQKKQSPQ

SEQ ID NO: 164016 - protein, 165 aa, Heterodera glycines
VIRLTRTTNIDKSGPLLVELLQNSLLIRRGQKVTVANYTIVPDEKSKIGEYLREYSTKVDCILTSGGTGFSKRDVTPEATKEVIERECPGIAVALLKKGLDITPFAALTRLTAGIAANCLIINLPGSPKAVREGFEVIEPILSHAIAIVKGDESETSVLHKRTAL

SEQ ID NO: 164017 - protein, 276 aa, Heterodera glycines
MLQAHQYQLQQGHRRVSARSILAHFGFEFSNDYRLGCGHYSKVYKGYFKEAQRTFAIKVTDLESVSEKFKQKFLPRELEVWRELDHPNLVYLYNDFQWSDYQFVVMELAVGGDLLSFLQKCGPVSETTCHNWMLQIVAALDYLHRKGIAHRDLKLKNVLLCENGVIKVTDYGFSKQSSDLSSTFCGSRSYSSPEILLGIAYDMFKSDIWSLGVTAFIMITNTMPFHEDLPNQQIVDSQRKRRYKYPSWLNITKQCRTAIDALLTYQPAFRPNISEC

SEQ ID NO: 164018 - protein, 157 aa, Heterodera glycines
MAGCLDALPHQAHFDWDTKRNTYSAVASGFLFFLAWWLMIDTAVTAQKAHWTNWYFALTVACTIAMFMVNSVSNSAIQGNYLDEGVLGVKGARLWLMFGFIGSFACIVAGVWVMFGDFVLKEGQNDNWPGIALFLHTFFIFVASLVYKFGRTEELWE

SEQ ID NO: 164019 - protein, 258 aa, Heterodera glycines
LQSTVLIRHLLLKSPSHDLCFVVPSSFSDPCPFFGDYQCPEGFHCAFDKCQDEQGMEPPGDCAKIRCGKESECRQGKCVLYVGRPCGRNVLVAEGLARAVVSDCGPQGKCIGGRCAIDRCADTVCEEMSELCRDGMCMQLSSMFCFSPFDCGPPSLFECHQNKCQRRRDTIVPVFSPSAQKCDPGETLSGDKCVTQEGCAQLVCSSGQSCFNGFCVPTSNSNCANSGECAEMNICREGPCVADICKANGGKCLPENAC

SEQ ID NO: 164020 - protein, 331 aa, Heterodera glycines
MPSAHGGPTFLLWHREYLKRMEIALRAIDPSVAIPFWDSAMDQRLPNPADSVIWSSSFMGALSAAGTVADGPVAGWITPSGGPIRRSLGTRGGNLLTEQEVASLIGQPQIENVLAFTSRARSGACTQPTPNPLSVLEFIHNGVHAWVGGDMLPLTTSPQDPVFFLHHSFIDYIWEQWRLLHQNRQQRETQFPPDSQIVPCAGSQNYLLSATMFPFQDPVVLNRAGLSNSYTDSLYTYAPRPTCRAAGDCRSRYLFCDTTSGRPLCTSRIKPGGNCASFVQNADQPCFASTCVNGFCQAAGGAAVAAQPQQQQRIVRSTVSVPNGTAPAAAA

SEQ ID NO: 164021 - protein, 92 aa, Heterodera glycines
MIIFIFSLKCNKQAINTSGKKSSTEYGKARTKAFSSMPGLHNKTTIYSLSLAPNSSCCAGLREVGKKMLRMFSPQRKLSSIERKSRASSKIN

SEQ ID NO: 164022 - protein, 208 aa, Heterodera glycines
  unsure (1)..(208): unsure at all Xaa locations
THRQMTQAMMVIRETSEKINLTRTIQDRAAKLYKEVLESKALRGKNNEAQAAACLYIACRQEGVPRTFKEICAVSKVSKKEIGRCFKLIQKTMETNLDHITSADFMSRFCGNLSLPYPVQVAATRIAKKSVEHDLVAGRSPISIAAAAIYMASQASNDKRTAKEIGEIAGAAEVTVRQTYRLLLPKAXLELFPPDFRFETPIDQLPTS

SEQ ID NO: 164023 - protein, 163 aa, Heterodera glycines
FFFFFFFFFFFFYYALFLFVFPNIKHTFEIRLSVTDLFAITSLHLTIVFLSLSSLVLLLELELGSKERNAESARQIKKSADEPTPTFDLHERRKVVRPSVTDWAGRCCRLPIGDFHGFGVVNAGSAGQMHRAHRTRRNGDNKTFEKHLSRKCHKNSAKKDGEF

SEQ ID NO: 164024 - protein, 100 aa, Heterodera glycines
LFINANYKFKCPFASAQFSRFVQSLASRSVAKINSESNDRFSLFPLEVLSAKSQVVAGIQYQLRIKAERSNCSKNVSERANSATHVLEFPSNNKYFYFFY

SEQ ID NO: 164025 - protein, 202 aa, Heterodera glycines
MNFFGRKGKKGPVVGKEGKEKGERPSHRRLRVLGVPLAQALRNDPSHDGVPVPAVVRECLDFISLYGLQVEGVFRVSSPKSRLDELERMANEGRTDEIVFQDAHEAAGLLKRFLRQLPENVLTTQLKGRFENEANVCRCVALCRCSAVIKLKELLLQLPPENFHLLAFVFRNVQLAIQKESANKMNLPAMGVLLHTILEMPR

SEQ ID NO: 164026 - protein, 268 aa, Heterodera glycines
MKKLTVHPDIMDIVRELDDKCLRSIEDSYFDRMGQGPTYHTDENAQRPELLDENGHRYVGLFNQAMTCYLNSLIQTLYMTPEFRNKVYSWKFVDTPTNEDNKNIPYQLQRLFLLLQTSEKASLETKELTTSFGWVSNEAFEQHDVQELCRIMFDALQQRWRKTENDESAVHKLYKGTMEDYVKCLHCKRENVRKDDFLDLSLAVRPFGASESFKSIEEALSAFIKPEILNGNNQYQCEVCASPQDAEKGLRIVEFPYLLTIQLKRFDF

SEQ ID NO: 164027 - protein, 215 aa, Heterodera glycines
MFSLCYRRAIRKSLANPQTIEVSSFHFSRVLEQNLDAASKRDEKGEEVPLWKDPYKHAMPEQKNTFSEFREANVHWEYVRRLLPRRLIPEIPQNAAEGVTPSGWRAPPEKAPNLPYYIRRKANHLPSIFLERRRDELNPKTMDFEYVELVILTGIDGDVFACERDLRAYCEKRLGHPIATHVDELKGKIKISGADRTIAEQFVYDYETEFSLCRG

SEQ ID NO: 164028 - protein, 190 aa, Heterodera glycines
PLLPITAGVAPSAMRQQHGPGQKRVSRVPIIIIPAGASSLITIYNAQEILQDLRYVSTEEKKQFSSKRENELLLQIPKNGVTVPYRVVDNPTRLKDEEWDRVVAVFVQGPAWQFKNWKWNGNPVEIFANIAAFHLQFDELPTDPNVKKWSVHVLKLSCTKRHLDRAELHKFWEMLDRHISKSNKREWLRY

SEQ ID NO: 164029 - protein, 265 aa, Heterodera glycines
VRYLAIFAKMNNAMDSVPARIVIIGTSKMRLSERFNKLQKAPPPPLPQAQQQKVFLKREGINGVAIGPVISRPRVIDERDRPDNRIQSSKSFLHDDYMDNDLYGDFVEPFLRRPQMGGFRSANLYEGFQPAPDPLKLTLDAYDQYSRFRPSHRRSIHSRITETSMSRFRNLPVYDESEDALYGDYDEPPRSRMYNQNDYNRRPIHQRLSFKPMRLSGYDFLRRPLHRHTTQFKRPFYNRGSHFSFNRWRTNDWNRRGASMPFGRR

SEQ ID NO: 164030 - protein, 227 aa, Heterodera glycines
MASSDSDSSSFAFPQNSKCGATASGQKTTANASSSLAMRVQRKVLSKLSKRGMVRLLGDNRLIALMDALYEMLREFYDSKTAEKVVKNGIKLIVKVGLLCRENKLSEEQQRLLSAVESEFGRLALTIQSFRKVQFSYNRTFLLSSIDAIHRSILKIVEQTLSEKSAKRVENVFGHFSNGEFLDFVFTSSGAIHTEMVRQFAAELDNLLAIGTEEDGGETARDENSTP

SEQ ID NO: 164031 - protein, 199 aa, Heterodera glycines
MKFHFNGGLDCPEWILSQIPEIAKTDTKMLQTLGSTIIEMAKVKQTEWHETDIKKFCFAEMSVDGLRALKAKTAALCFIFEKTTKNDCSCKDLEKELLQLGLPSDHVSVLVELYNSNRAALCDSLAGPAIKAPSLTVVCKEQVPTAADPSVKSDYFRLDTTSSDGSTATLLIHRDELVQLRTCMEDAVKVLESLVVNKE

SEQ ID NO: 164032 - protein, 217 aa, Heterodera glycines
GPLDVECHAPTPSTSPSNVNEPEILANLAAFESNFVSVISEQLGTDILPSSSSAVALHVSSLIRNVLRLARKFQRSARRKWLSSEDVEAALAYYGHTSLIGYEGVDDVKFRHVEKMGRDVFVREDPELDLNAVINTPPPKLTLEVTVKAHWLAINGVQPAVPENPLPPTPKDALPLANEEDSASTSAGPTSRTLLLNQYAKSMRKTEQVQIKSTTTH

SEQ ID NO: 164033 - protein, 162 aa, Heterodera glycines
MLSPFTYDPFNRRSLWPMTTIVGNVLSPFRQLERELDHFFDGMQPMLRDHVAQLNVSNKGDFTYKVDVSGFRPEEINVEVVGNEFIVNGEHREQNDSEFVHRQFLRRVLIPEGIQKESIKCELDGGRLLISGTKTAGKGGRTIPIEMKKAAVEQQKEEEKKQ

SEQ ID NO: 164034 - protein, 442 aa, Heterodera glycines
CTFYQTYCSKLKPYLTQNLDFVQQRLANSAADDPYWQGVKRAYLQMTGVWHGFSDAQFNVSIDFSLNPILMLNAHGDFYELETKFNRSKDPRDEATGGRCSGLVKIAPNNADILFSQVTMCGFESLLRVLKLYKFGYDRALYPGHTTTISSYPGLLYSADDFALMSSGLAILETTMKIFNNTLLNEIKPDGVLHCWVRAIVANQMARTAREWCHIFKRFNSGTYNNQWLIVDYNKFKPYTELPDHGLFYVLEQMPTIVLYQDMTQWLKQNGYFASYNIPFFKKTSLISGFEQKGNEFYWFSWKSCPRAKIFARDQHKVVDLDSLTKLMRYNDYTRDPYSRCNCTPPYTAEAAISARGDLNPANGTFEIPGMGHVNHAALDYKGTGYKMFKKLQFRAWSGPTYDDVPVFDWLESDLAPTVKHYGHPLRWEFLPVEYEWETVLN

SEQ ID NO: 164035 - protein, 65 aa, Heterodera glycines
FFFFFFFRKLMIYLYKLLLKLSVRVIDDSSIHPSFLSLSGKCYSFCRLNVSLTHCLSLIMPMARS

SEQ ID NO: 164036 - protein, 88 aa, Heterodera glycines
MADSTGNAAFIKAADEAKTLSYQPSNDELLELYALFKQGTVGDNDTPRPGMFDIKGKAKWDAWTAKKGTTKEDAQQKYIDLVEALKKK

SEQ ID NO: 164037 - protein, 170 aa, Heterodera glycines
VHIYHIPQLIMNKIFANDSKAVFEDDMHIGEAFDEVFKQIYEQENEMPFDRSREIWKEVEHSEKTLVHETNHLLKNQGLQNSIETEMKMLKDAEASLDALKKRELELVRHYKDKQSKILSSLDHVEHLTQMVDTDIENDQKTLNDILRSYEDELQEMKNLIMAKKRLLSD

SEQ ID NO: 164038 - protein, 113 aa, Heterodera glycines
TLHFYASSHFVDGLGNKLKTAVNKGLPVFVTEYGTCEASGNGNLNSGSMSSWWSLLDQLKISYVNWSITDKSEACAALTGGTSAANVGTSSRWTQSGNMVASQHKKKSTGVKC

SEQ ID NO: 164039 - protein, 244 aa, Heterodera glycines
FGEGLVDFFRPLELIQILLACPQSCTCLKNNFGIHLEGFFESLCVIRCKFGELLMNNGWETKFDPRTLICAYETFNIVALITKRIEQPRRNSQGEEIGVNEAERGLSLTDRILYNEMKWFATVLNERTPSFSIIQMFLRCLSLHLCASQLSAVVLNETASLLNELRYRLENVYDARPVMSALKKCVNHLNEALEGCEERDQAERIIEHKVRPMEEYFEAEERGDTTQMAAEENDAYHEIDDGEL

SEQ ID NO: 164040 - protein, 152 aa, Heterodera glycines
MKQQSVDSFIPSSNSLQICGGCEMRIEERHSLCVHRPRHFANFDRETEAEYWHENCLKCCQCERRLGTGEKRFVRDGRVYCREDHSKSFGTSSCQPNCARCAIPIEPAELVFRSGLFNVFHTHCFKCSCCGNALAKGDQYTNTGGALICQRD

SEQ ID NO: 164041 - protein, 163 aa, Heterodera glycines
RRECREMPSIEMPPIRPTRFFVPRPFRHHLRPAAHFRSNVQKCPPFSPIRRPSLPHIAGDPGKCWRITSITSRTFLASFRPAKLLDCFPSVCVMSNTSSSVVGIAQLKNGQKPCLLTWAEGHGPWPMCWHFAYLAKPAASDVSHSGQMQADISKLLADVTELR

SEQ ID NO: 164042 - protein, 110 aa, Heterodera glycines
  unsure (1)..(110): unsure at all Xaa locations
IRLFRWYTSGCCWWSVAKFDFFAHPLKLVLVYLLCICELHRCIRFLLCFSXNLSFGSVGVFEDFPAAAPFCSSIPKTKSATNEAATSSKMSLAGTDIGTGTAKKKMICLV

SEQ ID NO: 164043 - protein, 115 aa, Heterodera glycines
CGKLFHFCLGQRQLLCLTRALLRSSRILILDEATASVDMETDALVQETIRREFSDYTVLTIAHRLETILDSDRVMVLQQGKVEEFDSPKDLSDDLNSAFSAMLAGAKLTKSHENA

SEQ ID NO: 164044 - protein, 106 aa, Heterodera glycines
TNVEKPVGSIADYDPLAAEKQQQKAPAAGAAAPKANGGGFTVKALYDYTAADKDEVSFKEGDVIVNCQKVDDGWMTGTVQRTLLWGMLPANYVEQVKQPVGQFKLK

SEQ ID NO: 164045 - protein, 131 aa, Heterodera glycines
RRVGRTEQKWGGRNAREIGIFDARRIRRIGRANIGRAHSKGETERHSVRRIDTAQPRDVRGEQQLATERHSQRAVHLCALEFVDYKMFEQCLANDANTNDQIPAAIPLAIGGFAVPFLVTLSSILTLLLPF

SEQ ID NO: 164046 - protein, 126 aa, Heterodera glycines
MRKSGVESSADTLSPASSSAELSSRLLNANPVWSVYSSSNPYSYWPYRYLTDPNSHEVFWHDVHSQFSALRRLDLFGKHKPPVDYMANNHFWTYPYPYWARHRGYLFDYANPSFYSKEFDLHYYEH

SEQ ID NO: 164047 - protein, 323 aa, Heterodera glycines
AAGLNAVQLYIPWNFHEQEIGRFNFGGDRNISRFIRIAKQNELYVLIRMGPYVCAELEFGGLPWWLIKDQAKVRLRSSETTYLRHVHRWLAALLSVLRPLLYKNGGPILMVQLEKEYGSVSVCDHDYMRWLRDFVRETLGEDVVLYTTDGPTEKMLSCGAIESTFATVDFGTQQTEANVKEMFELQRKYSKGGPPVNSEFYTTWFSMWGEKSMVRQEIGPVLKTMDYMWAENASFSLYMIHGGTSFGFWSGRETNGPVITSYDYAAPIDEAGQITPLYGAIRNWIGAKKDWSNPPLPLPKNRTGVSIQNVFAVKLGDFIALTN

SEQ ID NO: 164048 - protein, 152 aa, Heterodera glycines
MSSRRNEYLDAKIYVGGLPEDATSEELDDAFHRFGRIRKIWVARRPPGFAFVEFEDARDAEDAVRALDGTRICGVKARVELSHGNGRGGGRGFRGGGGRYDDRYGRDRYDRDRDRRYRSRSRSRTPRRSRSRSPPLRERSRSPSYSRRSRSR

SEQ ID NO: 164049 - protein, 95 aa, Heterodera glycines
SSVPSLIMLGIFVATFFSSMSNLIGASRVLTRFAQDKLFGALLRPATIEVGSKRNPIISVIISWICVVMVLMIGAMNRIAKLSFPTNTGIISGKM

SEQ ID NO: 164050 - protein, 73 aa, Heterodera glycines
NMRHQFPIIFALFLILPILIGKTECQSDFWASLSQPLVSVGSDAKMPLKDFGMDFSRLNDYSSLFGRRKKRAH

SEQ ID NO: 164051 - protein, 43 aa, Heterodera glycines
  unsure (1)..(43): unsure at all Xaa locations
FALSDHSFFSPXLLISFLITFSPPPAFDHFFYCLSDHSNFCSF

SEQ ID NO: 164052 - protein, 181 aa, Heterodera glycines
  unsure (1)..(181): unsure at all Xaa locations
MSPFPPSATDIFSLLDAIDKLKHLKRTGWVLVGISEPETVASHMYPMATLAMTLSAHRTDLDVNKCIRMALVHDIGEAIIGDITPHCGVSNEEKFKIEKEAVETISNWLPETVGDEWKNLWREYDEGKSAEAKAVKQLDKLVXDMLAQAFSYEERLSIDLTEFFDATSNAFSEEPFASWAA

SEQ ID NO: 164053 - protein, 65 aa, Heterodera glycines
FLPPSSAHFVTTYQPQLLTSARSCCEISICSRLSMRSRHTLTRVPCTRCCSSISSRRTLIISSLF

SEQ ID NO: 164054 - protein, 68 aa, Heterodera glycines
GQFNGRIFNNKLNNLGFPTFITFAQLMDPSRGFYDKDGDKVTLAVDVAVKSKKGRSANYRMSKSHHIW

SEQ ID NO: 164055 - protein, 109 aa, Heterodera glycines
WNKNIIISFKINPMKLWVEDTTDEDLFPHFDIVADQIHAVIQDRGAVLVHCVAGVSRSAAICLAYLLKYRTRSLRAAYHLMCSKRPMVRPNLSFWRQLIHYEQVTRSIC

SEQ ID NO: 164056 - protein, 78 aa, Heterodera glycines
TCPSQAVGDRATQQHSSPSRMQPKKHDPSLSHPSPLGVHAPPHWPFAIMNMFMVMMVANKITAKISEKFFILFRVFWN

SEQ ID NO: 164057 - protein, 66 aa, Heterodera glycines
YHNGNSEPRGFGHIGIAVPDVDSACARFEQLGVKFVKKPNEGRMRGLAFITDPDGYWIEIFNPNNM

SEQ ID NO: 164058 - protein, 118 aa, Heterodera glycines
HIQNILTKMAFDSFDFQFHFAFSFFLCSSLFLFSVRRLFLQFSLFCAHLIKSFFWRSVDAFVINNDEGNQSDGKGAKSEGEQFATFHFVLHSLPMASDFVNFNSLIKITHRPQILVSA

SEQ ID NO: 164059 - protein, 90 aa, Heterodera glycines
  unsure (1)..(90): unsure at all Xaa locations
FFFFXXXXFFTTFFLMTNKEKQKILKWKTKIKSKERFEPCEHFHHQIPLTKTRIFWQQVEKHFQLQNLFHEAQLVPFDLLKLVPRVDFVH

SEQ ID NO: 164060 - protein, 106 aa, Heterodera glycines
MPRLLSSFAFFVLSIICSIVFFEPIHGQDVCRHQGKEYRNGDEWIVSNSFIMNCIVHYNRWETKIIACLSMLGERIPVNGQISDQHGVWKCEQKPNGSTRLVQQKQ

SEQ ID NO: 164061 - protein, 42 aa, Heterodera glycines
FFFFFFFFFFFFFFFLFFFFFFFPNSALNDYYHKKETNLRLN

SEQ ID NO: 164062 - protein, 79 aa, Heterodera glycines
RLNNEYLGISCFFFAFFLLELFFFLFSAAVANGAHLVDSSVDQIGRAQHNHNGDINIRRGIERFNDNRMAQNELDFLHI

SEQ ID NO: 164063 - protein, 114 aa, Heterodera glycines
MPGFVPPVQSKCPKCGKSVYAAEKMVAGGYDWHKFCFKCEMCNKLLDSTNACPHEAQLYCKQCHGRKYGPKGVGFGIGAGCLTTDSGEKFGNKRVENRPLMAEAFTAPINPQQQ

SEQ ID NO: 164064 - protein, 97 aa, Heterodera glycines
MLKKAIKSGLPVFVTESGAGSGGSNAPVNLPVMNQWWSLLEQLKISQIIWAVRGEGNLQNPLNKNTAPANIGQNWALTEYGNVVKNVFTKNAKPIGC

SEQ ID NO: 164065 - protein, 98 aa, Heterodera glycines
RFVFCRTPIRLRSRRHAHPSNCQTNRIGASYAAERRPPRSKETRTEAEEEGKRKRKKKRKKWNEMEPEEKEEGKRKRKKKRRKRNEKETEEKGEGKRV

SEQ ID NO: 164066 - protein, 131 aa, Heterodera glycines
ILYFRKTQKISNAFVLSKKQSPNFSSTFIYSKSFFTHVRSCSATPAAGACLGLLGSLGRSSFCCCRRRFSFGWRSGLNTTAHGHGSDQRNQQHHQEAERRHFCFLRDLLVFVFDSSDQNHLKYQQKSKSFL

SEQ ID NO: 164067 - protein, 136 aa, Heterodera glycines
CIATYETDGQAQLARERLHNVVWPVASDLALCVEFSTEEKLNRRKAEEEQEASANNSALGGGLGLTIVVDNRGRGPETVPNSGPTVLIQHDKKRQKDAENRKRKVEELEKSQKTLDEVFKKTKTLPAIYFLPLSDE

SEQ ID NO: 164068 - protein, 179 aa, Heterodera glycines
FIPASFLEKQSMNLRKKTKVEPIEDEIPENEQQINISTRSHNSSYNSDRVNENDLVKSLSQCLLANVSKRGFVRDADIGEMFSDRRERELRANVLKKSEKLLMDVLGYRLDRDEEGKRFYLSTNLCKGIAMAMEISDDTHRGLNEFADEDAFEEESTQTEQFTNCLLEMALMFIFMSKR

SEQ ID NO: 164069 - protein, 86 aa, Heterodera glycines
TFIGNSTAIQELFKRVTEQFNAMFRRKAFLHWYTGEGMEEIEFTEAESNIGDLISEYQQYQDATADEDVMEEEKSETEGEKADEAN

SEQ ID NO: 164070 - protein, 56 aa, Heterodera glycines
FTHYRRTSLRWIDDGSRVYALPEDIVEVKSKMVMTVFACMMALDFMPNMKEVTNGN

SEQ ID NO: 164071 - protein, 132 aa, Heterodera glycines
SPPSKLLKQMNKTSVGRGGGKTSTDATTETSEDDECFEGTHSVSMHSMRQRVLQRMEDEHLFDSYSFVGLSELDDELEKCADDPDEQVRLIESRMRELSEIFHKYKGKLADLEKEHKKRSRQEKKRKMMTDK

SEQ ID NO: 164072 - protein, 200 aa, Heterodera glycines
  unsure (1)..(200): unsure at all Xaa locations
YLSKSNTYYLKIYAFLNSKMGQKESRHAFVNCALIRREEFEDKIQELNKKCAECFEESTLNMLFATKSTEERGILWQRSVRIHCFTVFDEKIYRKVYSLFQFLKFYESFIQILEASEASKHRENSLNNKDLMSMSIFKGKLXEYSEDGRCIICFDSFPDSVLPCAHAYCSKCVDPFPAVHQPCCPLCRHPLKRDGQDQTW

SEQ ID NO: 164073 - protein, 64 aa, Heterodera glycines
ARPPPRAINVVANKEWMDGRVLIALVEMIAYGTINLLFFISSIPSKVLSLKALFCLLLVNKFHF

SEQ ID NO: 164074 - protein, 72 aa, Heterodera glycines
MRNLLLAALAIAVMLLCCAEAVPMENENQLVRHKRWGYGYGGGWGGGWGRGGWGGGWGGRGWGGGYGYGWGR

SEQ ID NO: 164075 - protein, 77 aa, Heterodera glycines
KLFWRETIREKRRGGQSDRRWRRNRGMSILDSPRIILNGKTNQFNVLKFVMYFHHSFTFILFCHHYQAYSYISGSCK

SEQ ID NO: 164076 - protein, 127 aa, Heterodera glycines
MTTTNPNYDKPLCLNGLSQYEALPSSLCNLNLCNFIGRNLCELLQQPGNHTVREMEQKAAWNATVVMPDSPRIFGIPFVDLFAGEFNFEFLLETEGKEIAHLEVPTNLAFVPIGMQNEEDEDGEGQC

SEQ ID NO: 164077 - protein, 180 aa, Heterodera glycines
MAYDYLDRLGKVDGLDFDAFTRQLFDRWFGAYTRCGTCKNGKCSRHGGPLGSSGWEHVFSGEWRGEIVDGHHSWVRFYLQEKAGDIEYHGYYVKPRHGQFIGTIQYKWKQYLKRIGGFMIGTSPAFDFSLLTVCILTEPGDRKCKFQLKETPMFVSSFLEDCVIDGSFRHNFCIATAYPG

SEQ ID NO: 164078 - protein, 195 aa, Heterodera glycines
  unsure (1)..(195): unsure at all Xaa locations
DIVCMANICVQKQEFTEATSGPGLTFVAAKFDGILGMGFSEISVQKLPTVFDNMVTQQKVPEPVFAFWLNRDPTSEFGGEITIGGTDQRRFVAPITYTPVTHKAYWQFKMDSISGGNGKLACQNGCQAIADTGTSLLAGPKNDIEKIQKHIGAIPLFHGEYMISCERIPTLPDVTINIGGQAYTLKGQXLCAEND

SEQ ID NO: 164079 - protein, 153 aa, Heterodera glycines
LVMYIRELESPDEHSLVLFNPLRSCFRPTRDELFSAIACQRRSIVRLNTERARFVRQNGALLRMIVRLTGGIPPNFNHAHFAAAAQPAVNVTAVITNANPNGQNYNRLQRLHAELSETIDRFTEENSLLGYMNDQLTEQLEPLTEVPPNANFN

SEQ ID NO: 164080 - protein, 42 aa, Heterodera glycines
LVFLRKSLQRMSQHYLQLSIEITNCRVHLLYPIHLFFHFIKT

SEQ ID NO: 164081 - protein, 253 aa, Heterodera glycines
MSFLLFVTIAFANLAPNAFGQQWPKATSDETVSATIKVSGGTKDFGYKRLTASSALGTGDQSEGQKALIRAEKGAVIKNLIIGQNGADGIHCYDGCTLQNVWWEKVGEDAATFRSSSGCKEYNFLVTGGGVKNAKDKVFQMNGGGTLTIKDFVAENIGKLARSCGNCKSQCQKRKFVVENVKVTGLKTLLCGLNENYGDVATIKNVQVSGPSKKVCAEFEGNDKQKEPPMLRSFDVGSSGDGKNCIISSTTSG

SEQ ID NO: 164082 - protein, 32 aa, Heterodera glycines
IYSHKSSFCMIGIKHFCLTLSCNLIPKINKYV

SEQ ID NO: 164083 - protein, 80 aa, Heterodera glycines
FMINKETENVRSSDEIEMAFRALSKEYRPYVFAEELFANLTQEQAQYCKQRMKPYVDAASGRTIENALDFEQFVHSMFMN

SEQ ID NO: 164084 - protein, 129 aa, Heterodera glycines
MNVKGGGISQVNDSTSDEMRLFRGGLRHAGQTPSRLIYDTTSCIRNYHDKYSYERGFIAHSRSPSNQYLNFHFMYGGFKKFALERHVYQNWYRKNIRNWWLPAIICYTAGCLTMRMYDNAAYDYFYFSD

SEQ ID NO: 164085 - protein, 95 aa, Heterodera glycines
FAVLLILSLQIAEIIAKKPKYCGERFAKMRDKVCRWPGEQQPCLQLHHSIKERVRTKCCAEGCSLEEMKEEMCCMTDACLRRCYPGKGYRLGSVY

SEQ ID NO: 164086 - protein, 113 aa, Heterodera glycines
MVFQLVYPILPAFAKPAWNHPAGPKTVFFWSPTIKWVLVGAGLSDLARPANKLSIYQNTALMATGMIWTRYCFVIVPKNYYLASVNFFVGCTGLAQILRIAHYQYIHSEETSK

SEQ ID NO: 164087 - protein, 134 aa, Heterodera glycines
LKTQLKFVGFGKYFSFKALSWYFQSFLIGIDTLVVGIRDDNFKLTHVEYYPLENLQSFFKKSGFDTNKCLLFLHRFLSTVKNELNGVPEGSILVTERLKNTDQFVFTTIDVEDEMGQAEYAVISKEFRDHNWTH

SEQ ID NO: 164088 - protein, 161 aa, Heterodera glycines
PKNEFKALDAFALSAHLRPGRHRCDCQARLHSLVRNCIGCGRIVCAQEGSGRCFYCGRLVCTREEKTIIERKDGEGLRLLRCLLNDLQADYFSLEHNPYLTAAEREAIGNRKEELRQLSLSVKRNILVDLDISNGAMHQQKQKPIETVDDPILQAILLNSA

SEQ ID NO: 164089 - protein, 133 aa, Heterodera glycines
GAVPPNRCAQIYGETESFGNSFPIACTLILRWIFAPHNCLSTPNGHLKKSIFFVFGAVPPNRCAQIYGETESFGSSFPIACTLILRWIFAPHNCLSTPNGHLKKSIFLFSGQSPRTDAPRFMGRPNPSGVASL

SEQ ID NO: 164090 - protein, 176 aa, Heterodera glycines
  unsure (1)..(176): unsure at all Xaa locations
MQKIRVANPVVDLDGDEMTRIIWAGIKEKLILPYLDIDIKYYDLSIENRDATDDEVTVDAAEAIXKYNVGIKCATITADEARVKEFGLKKMWLSPNGTIRNILGGTVFREPIICKNIPRVVPGWKKEIVIGRHAFGDQYKATDIVVPKGSKFEINIIKSDGPVERDSVFNFADTGG

SEQ ID NO: 164091 - protein, 92 aa, Heterodera glycines
RNQNANELAKNGVKQSNVSVRTQKSAYMSGQDYSLNLVYQQFLFEEAQRFQGHFPTPCHFPQCNRKPSRCPTPSLLLLAPQPVHNNHFLQSE

SEQ ID NO: 164092 - protein, 179 aa, Heterodera glycines
MPRGDLRGLGGLLDSRGLLSSGTQFIVLSLSSASLAESLLSLPMLSRALVLIELLRNDRMECSDFSDGLKVETMSSENTSSAIESSVCCCCWCSATGSTATTIPFPDDMVETEEFGKDFAECEAIESSSGILSTSANVLCVKAELRTKLFAEITSTSSSSSSPLCRLPCTDCAFGVHSP

SEQ ID NO: 164093 - protein, 62 aa, Heterodera glycines
LYEFQALNPGELDFKEGQIIQLDSQIDEHWFEGTVDGRTGFFPITYVEVIVPIPSSSTTAQQ

SEQ ID NO: 164094 - protein, 175 aa, Heterodera glycines
MNCSFFLCLFTVQLILLNFAVEGREDDELKRKKRNTDVDVLGLVNIHAPSRKNVNVDVGGEERDRNDKLVNVNVQGHRKNVNVDVGGGHYNEGKVVKYERDGERGREVNVDVRVPKVKVDVDREDGYPKKKRVHLKVLDKLRKYDSEESGERRRHRVVKIERDGGRRHKTVYIER

SEQ ID NO: 164095 - protein, 97 aa, Heterodera glycines
IRPVNSQRFPSIHFLFFYADNFLIEFPADDNAMASDGQAVAKWLFTPRPDNVPKLFKCWLCKDDPNWRRKLKRSKRHLPMLLTTPISLSSSDDDCLL

SEQ ID NO: 164096 - protein, 78 aa, Heterodera glycines
MFSISCKFCPGWFLSLSSMLCIPIYAIYLWVVTDGTVSEKFKKLFRPDVNLVPKSDKDREEEKELKRAAKLAGVGTAK

SEQ ID NO: 164097 - protein, 157 aa, Heterodera glycines
MRTFLFIAVVGLMLAVILENVNATGKNSPTKGKQSLDSPNHEKDHKNEHEKYEAAYIYRGDFFHDSKNEPHVEEQLVAAIYDLISKYKVDLYEIVIFVSKSPCFHQDCEPKCEVVDECKCNKACAKLLGLLLSKVRKELSKVDVRMTVKFLYPHLNR

SEQ ID NO: 164098 - protein, 49 aa, Heterodera glycines
GFPQPHVPSDHIPIMSQYAVIPPNFQRSLPPIHHYGGSAHSGGFGAIGR

SEQ ID NO: 164099 - protein, 112 aa, Heterodera glycines
MPHFVHSMSGGLVLINATETMDGTYECATEESANGKVPLAIYSLRVDGADCARPKSVEQFRSAQREWCRRMDTYRSNLSKWESIRDANGQGKGLCDTNAETERRTDSGNFVA

SEQ ID NO: 164100 - protein, 119 aa, Heterodera glycines
HIFCMSAPNNSPSSISSTGTNGIRITRQRSSARINWLTELTTRDSTPVTTTQTSKDFSEISKHLALVEDEDNIKRIQAKREKEAHERALAFVKNQLLNSRKDDWLHQPIEELLGYAPKY

SEQ ID NO: 164101 - protein, 109 aa, Heterodera glycines
SKFHLENSINSILKWLHHRLNWFRFQCFCSSFALAWPLSRPKLIMAGVATAMSILTDFMANGKPVLAHPKMLALLVAVEKEIPTEEEEEEEDHHHQTIFERKKELQNQN

SEQ ID NO: 164102 - protein, 76 aa, Heterodera glycines
CEIKYASPISNYFCPFSHFTNFNWKGNFKLILNVEKCNFENVSADNCICFRRSAKVTFGPLFPSLWFPWAVMRKCH

SEQ ID NO: 164103 - protein, 94 aa, Heterodera glycines; identical to SEQ ID NO: 131070

SEQ ID NO: 164104 - protein, 140 aa, Heterodera glycines
MRSLLFLAFVALFVVKCSADESMQNDENDEQFPPGPPPSNEMSEESNDRRKRSPFFNFFGGFKKGGRGGRQKGEKPNGVPPTGSPPAEREKRSLSRGNAKMGGRGPMGGRGGQKGGRGGQKGGRGGRPKGPPPTSPAPTE

SEQ ID NO: 164105 - protein, 175 aa, Heterodera glycines
RFDLSMILVTATLASDSTPGTHVLDNSDVGFLSNGNANCTLFERWASYVGNMNSVSIMDCVAAARQGDMGQDIPNTALGLFKWCTACFGKSVGPGHSAGTATAGRKLADAAYADEAAINEHRVGKHLLKRVHLTPRSVVKQLVATTVRGTWKMYVVCVSAVFDLDDPNGSWNWRQ

SEQ ID NO: 164106 - protein, 70 aa, Heterodera glycines
LYLDPTRPQISFPFWPFLPYDSFMFSFLAQVKLILGSIFALFSLLCQFLLLFCVFVFAFYQKPAMDSKKV

SEQ ID NO: 164107 - protein, 141 aa, Heterodera glycines
IHRAAGPQLLEECRTLKGCEVGEAKITKAYNLMPNIKAIIHTVGPQIGTEVSDEQCRQLRDCYANSLSLARDNKLRSIAFPCISTGVYNFPKKEASEIAIKTVRDWLTEGQNNEKLDTVIFCVFGDDDLGFYEKNIPQFIL

SEQ ID NO: 164108 - protein, 43 aa, Heterodera glycines
QRKLTGMVRDGVNSASRYYYSQICDANKQNVIDILLGQQRTAE

SEQ ID NO: 164109 - protein, 195 aa, Heterodera glycines
FEQREPRSGGIGRITNGHGEKKYKSAVRRENGRIDAKRADANWDIKRRRRRGEGRQNERTKHKWEEDDSQGTLFVQIEIHARAKKQRLVQSLGGHQSKGNRTTVATERRQTNDGRRNPFVGSGYVPSFGAPRQQPPNANSNANSLGNSSSSISIGGGPADNAKTNNAFSTIGGRTNWAAKYQRKKKKKNSRLVLS

SEQ ID NO: 164110 - protein, 59 aa, Heterodera glycines
QLFVPVSKANGFAASSFLSFSSGSSLSSRSNILTWYIEMARIGQSVYPDTVHSDSNSIN

SEQ ID NO: 164111 - protein, 80 aa, Heterodera glycines
KNSKTPFVGHYFKKRKKVDIDHGPATSSHMTSSPVNSIAILMVEPKRFDSNFSHSLVVMGDFFLVNLATYRLNQCDTSRV

SEQ ID NO: 164112 - protein, 115 aa, Heterodera glycines
MDDGEIVGDNQNDSGGDNECDRRAIVSQQQKSKEFSSVQAEESEGNDDDAFVPEPMTPPRPTTPADCETGIPSPKTPPPVASSHPTRIKEVIEMRENERTVRLLDIITLDCDDEW

SEQ ID NO: 164113 - protein, 178 aa, Heterodera glycines
NYELATALLRRATTPPPVRRDSYFDDSAKVQNRVFRSLKLWSLYADIEESMGSLESCKAIYERMLELRIATPQIVINYALFLEDNQYFEDAFKAFEKGIGLFRWPLVFDIWNVYLTKFIQRYGGKKLERARDLFEQCLDKCPPKYAKNIYLLYAKLEEEHGLARHAMDIYNRANGAVE

SEQ ID NO: 164114 - protein, 186 aa, Heterodera glycines
YTIIVSATASDAAPLQFLAPYSGAAMGEFFRDNGKHALIIYDDLSKQAVAYRQMSLLLRRPPGREAYPGDVFYLHSRLLERAAKMNETHGGGSMTALPIIETQAGDVSAYIPTNVISITDGQIFLETELFYKGVRPAINVGLSVSRVGSAAQTKSMKQVAGSMKLELAQYREVAAFAQFGSDLDAS

SEQ ID NO: 164115 - protein, 114 aa, Heterodera glycines
SLVKLPKQFFSCLSPFFATETNGRQLTTKNCRKCAKEILWSFFLLRRRFWVISFSRGAPGTTERKGSRGKGGQCQRGKVGKWTCRAVTRREFNSRNIYCICFCYHPFCNYKPYQ

SEQ ID NO: 164116 - protein, 176 aa, Heterodera glycines
LIVWRLIARSLGCFSKKLERKLTIEPKDNNEDEIETETRASRETLSTESDEGNDELLQFPVWFLIAVTIIWILLCAYLFLLWEDTWDYGLSLYFVLVSFLTIGFGDVIPSKPDYIILVGIMILIGLALVSTVLTIIQKQIHALADNMKSTIDKDYQAALEELDEDQIEPIDGQRKE

SEQ ID NO: 164117 - protein, 103 aa, Heterodera glycines
QTTPWPITVHLKNFPDELIRCRTKETLKFCFLQSLKEACQLKLGSNIAASMTKDEHGRLFDGLCNDRFNDFWMVNDKLMGLRSSSGEEQFSTIPARFYEVLIY

SEQ ID NO: 164118 - protein, 85 aa, Heterodera glycines
NFKIKINSLRMCSWARTHRWVTHAFQRKGTTANKCKKHCVLLFQIVSVEFVKQRCLRCHSPLVHLLRHQIERHVPGIISNCLKNG

SEQ ID NO: 164119 - protein, 142 aa, Heterodera glycines
AIHRAAGPQLLEECRTLKGCEVGEAKITKAYNLMPNIKAIIHTVGPQIGTEVSDEQCRQLRDCYANSLSLARDNKLRSIAFPCISTGVYNFPKKEASEIAIKTVRDWLTEGQNNEKLDTVIFCVFGDDDLGFYEKNIPQFIL

SEQ ID NO: 164120 - protein, 185 aa, Heterodera glycines
GDNGMYLNIILGSNLNITLPSPDERYRYKKEYESFKLSVAFVILAVFFVVIWLPPTLRPLDALCNFLLVWYYCTLTIRESILRLNGSRIKGWWVLHHYITCVLCCITLTWSGGDCYEHMRPTFVVLVCYVSSVQIIQYKYQTGCLRRLHALGQRHSMDITVEGFSNWMFKGLTFLMPFLIIGYFL

SEQ ID NO: 164121 - protein, 83 aa, Heterodera glycines
  unsure (1)..(83): unsure at all Xaa locations
NYNRKFFLFLKKCFESLKFFFLFFFNFFYFFFXFIKKKKIFLLLFFLIFFIFLIFFIXFFFLKFFFRIIGNFFFNFFKLPLDY

SEQ ID NO: 164122 - protein, 175 aa, Heterodera glycines
  unsure (1)..(175): unsure at all Xaa locations
LRGGYVQFDNIDPTVYVHFKKMISAKLCSTVLGQVAMDCVVDHPKPGDPSYDQWLKEKNXVLDSLHKRAQLVTKAYNQVEGVHCQQVQGAMYAFPRFLLPDKAIAEAKASGVQPDFFYVKQLLEETGVCVVPGSGFGQRPGTFHFRTTILPPIDIFEDMLNRFGAFHKRFLAKYK

SEQ ID NO: 164123 - protein, 179 aa, Heterodera glycines
RKINENSELHSKLFDVERRFDEAVTAFTRRIDELEKENDALKSLVSIPFDAEQRKEFGESENTAPGQTLQQTEANSEEKNAPSAVVPKTDSADDLLGCSSAFANESADLCSRKPSAIAKDEAVEEMAAEKYSTERIATLGESLRHAKGRATYYKQECEELLRKAICDQQRIEALEQNIF

SEQ ID NO: 164124 - protein, 182 aa, Heterodera glycines
NSFFLKMLSAAFFMPLFFIAIGQFLQISDAIDCFSCASPALHNQWEATGLPEIPPPDRFAFHACDGTGTDYKPCADVCMEMLVAAGNEYGVVRGCMSDFYHGQTTSTNTDKCYFGGYPHNVTIYDPTNGAKTYSQLYVGVRYCSTVNGACNNKFMPKKEAAEGSGLLPKHFVVRPNKCQQRL

SEQ ID NO: 164125 - protein, 168 aa, Heterodera glycines
MKLFSMFLLLTLAFAAFAESSSSSSSESSESSEECSSEEGNPGTEPETTTVVDSDENCNATSDSPNDESSPVPSSDSPNDESSPVPSSDSPNDESSPVPSSDSPNDESSPVPSSDSPNDESSPVPSSDSPNDESSSVPSSDSPNDESSPVPSSDSPNDESSSAPSSDS

SEQ ID NO: 164126 - protein, 138 aa, Heterodera glycines
RLTPSSFGYDDDDLFDIGTAQSVAVTGILTCNGRPSGGTKVKLYDVDTFDPDDLMAEGFTDEKGHFLLEGFEMEISDIDPKLNIYHNCNDEHFPCLQKFSIEVPDNYITEGKRPQKIFDIGKLNLEGKFSGQHRDCIN

SEQ ID NO: 164127 - protein, 122 aa, Heterodera glycines
NAFIRIKRRFVCQSLVPFASELSNSMNIFWQAPSDGEVQCCNEFNVSNSTHICFRYLAPPQLAQGGKRKQRIRSVGPAGQKTIGQWQRRSPYSLNFPTLTRSLASGRTQKARSSNNFKQYTI

SEQ ID NO: 164128 - protein, 110 aa, Heterodera glycines
MDVSVINYCPKNATTIVLAHNPSAARKIFEFSQSNDHPVDLILSGHTHNAQYLVLMPFAYFILPYLYGLYVLSDGATKLFVSAGTLFQNAPMKIPFMSEIWSIEIEPRKQ

SEQ ID NO: 164129 - protein, 63 aa, Heterodera glycines; identical to SEQ ID NO: 133893

SEQ ID NO: 164130 - protein, 287 aa, Heterodera glycines
MENDQQQSPEDQISAEAAINLLAVTTTHQHIFGGRNGALFVEIRRIAEQQLEHALAPVDVAGGKWELFVKDGELRMYSRELEVENGIAADPLKALHVIDGVSAHEFIDLFFRPELKKEWDDTLELGKVVETLSPHTAVIHQIHRRVWPAAQRESLFWSQRLNVLSECSSVTDHVPGELLGAWMVCNQSVERDDVPLSDPSAVRVRLTIAMLCRTVLKPGADRTKPREQITREDIRCKITYVAQIHPGGWVPKIGIRQIYKREYPKFLRSFSKYVLDKANGTALALPL

SEQ ID NO: 164131 - protein, 231 aa, Heterodera glycines
  unsure (1)..(231): unsure at all Xaa locations
MSMNSLNMGKEVAKRWMGINNRRMAPFSLSPVDRMRQSVFRVRSRLAVNLLSEGLATFLLLLVGNGIGAQHILGGGKLDNYMQVCFGWGMLIALLVFATYHTSGGHLNPAVSLAFVSLGKLPFAHFLLYSLVQTVGAFFGSALCLHIYRESFEKFDAGIRTVGGPSGTDTIICSFPDEHIGHLPAFVDEIVGTGLLLLFAXALIGPANQPPKWVPPIRFGVAIVPTTPSFG

SEQ ID NO: 164132 - protein, 227 aa, Heterodera glycines
MLKSNILCVEVFKVKFCCRMDIGNCCICLGGFGVAQMGVLPCLHTFHHSCIQRALGQNAQCPLCRRHAIDTQIVRPKYEGSCREAGDLPRKAMRAALAFYDRTVRHRFADGSSGGEAQREELKLCLNSLVSTLESADAEREAKWERLKQFLRVCGTAAIFAVLAFLFTLYWPLISSLAVGVVRTVWTLISSLRDLLVAHWPDLLFGGLLLSTFVDMESSDSQQQQAE

SEQ ID NO: 164133 - protein, 79 aa, Heterodera glycines
IRDCRKWFPICSSSSEQFVKLVLNSLQKVHLYVRVVSPRSGMDSDLEAFSHYPAHGSFAALPGRTAAKTNYVNERFLSY

SEQ ID NO: 164134 - protein, 157 aa, Heterodera glycines
HTQPNELPQLSPQDITMHSKIIHQNQWDGERSVIITCSFTPGSVSLTSYRLTPSGYEWGRNNTDKGNNPKGYLPSHYEKVQMLLSDRFLGYFMVPSAGVWNYNFMGVRHDANMQYDVCLSAPKEFYHEDHRPLHFHNFNVFEDPLGVSTADREDIFE

SEQ ID NO: 164135 - protein, 178 aa, Heterodera glycines
NPSLNLKKESVLKKTFSVEAGDSLTNAILGILPQQSADNAEADSTGNGPMHSAEHHQHETDQQQQMISSGTGAASVEGNAIAAGVRRHSLLGPIPIRSQQQQSVEGQQSTIGQPMVRNLPPATVRTANFAQNHPQSLVNSQHPTVANNCHSEQHFAGRKRRAFPPAAAVVGTAAERLL

SEQ ID NO: 164136 - protein, 177 aa, Heterodera glycines
QFRPQNDGFFSEDEQQKWVKEHIGEAEIIYTMGPIKVDASLLVVAKALKAVVTISAGHENIDTVECARRGIRMGFGGAILTEATAETAMALLLTVSRRLVEAVQIAKEGKWPNNWSPKFCVGKALEGSTVGIFGMGRIGRSIADKLSAFRPLEIIYHNRKANSEYGRIDGRLNDFAN

SEQ ID NO: 164137 - protein, 97 aa, Heterodera glycines; identical to SEQ ID NO: 160047

SEQ ID NO: 164138 - protein, 173 aa, Heterodera glycines
MFGAGPPSAQPSDIVKFPTVTVVEAAKNEHDDAVEPIPTSLGTEQPAAPPAQPTPAAATPQVQAAGAAVAPSQTEHQQEKKEQSADELVEVDAPPQPIVPQQNNQPAQPQQQQPQQQQQEEMTKTEQEQPQLNQQQQPSPPGISPFQQKWFPEVPSVFLQVDDPNGGNAGGTD

SEQ ID NO: 164139 - protein, 251 aa, Heterodera glycines
LIFDSNPVAFPPLTSLPFAIIIVVPFKEFPTSTFPMYHYQYRIIVIGDSTVGKSSLLRYFTEGKNAEISDPTVGVDFYARMIEIKPNYRIKLQLWDTAGQEKFRSITRSYYRNSVGVIVVYDITNRRTFEHVVDWMTEAEANLGGPDPAQLVFLLVGHKADLEEQREVLYEEGEYFAKHRRIKFIETSALTGENVNEAFLIVSREINARFETGALRICDGWDGIKSGLLRTQSITLSDIQETTKENSQCYC

SEQ ID NO: 164140 - protein, 170 aa, Heterodera glycines
TGTTTDGGGGGTTTISSEAEEGGTAPAETETELYDAELVERKVREIEGKWKVEVEKSENENKEKLKRTTWKWKGGKSTGTTTDGGGGGTTTISSEAEEGGTAPAETETELYDAELVERKVREIEGKWKVEVEKLENEKEILERNIRELEEKLAQMDRGDQRAKEEIEDTK

SEQ ID NO: 164141 - protein, 148 aa, Heterodera glycines
GIFHNAKKTFLVWVNEEDHLRIISMQKGGDVGNVLKRLIRGVKGIEKQVPFARDDRLGYLTFCPSNLGTTIRASVHIRLPKISAKPEFKKICEDLKLQVRGIHGEHSESEGGVYDVSNKARLGLTEFEAVKQMYDGVKKLIELEKASK

SEQ ID NO: 164142 - protein, 112 aa, Heterodera glycines
  unsure (1)..(112): unsure at all Xaa locations
FFXYRQILLFICFRQEIDRKCMQIGEKTNKICERIRENAKLKNGRKVRKTKSGKVKIKKRKKDKATNGKVKKGRGDRGQMIHVFSRMNELFCENGEGYVVLLSFAFSDISLP

SEQ ID NO: 164143 - protein, 26 aa, Heterodera glycines
  unsure (1)..(26): unsure at all Xaa locations
FFFFFFFFFFFFFXXXFNQTSLLSKK

SEQ ID NO: 164144 - protein, 119 aa, Heterodera glycines
FFFFFLKIQKNLFLFLKFNILNAAKNKRLKALCARSFLSSILCFFFLAMASNHHLRRCCHFLLRVSLFLVPYLLFCCFLFLLPFLHFRFSFFHLLFLHFRFFVVSFKIFTISRWICIDD

SEQ ID NO: 164145 - protein, 157 aa, Heterodera glycines
MSTREEIQAVCVQSLKQLKIGVGEEELQNGKDFYKFFFTNYPTLRVYFKGAEKYEAEDVQKSERFEKQGQRILVAMHLIANVYSNEMLFNAYVRETVNRHRQFKMEPSLWKAFWTVWTGFLETKVDLTEQAKSAWMSLGEDFAKEALAHLKRLGIPH

SEQ ID NO: 164146 - protein, 138 aa, Heterodera glycines
TSAASSVFNDASSVSSGGIVERLWGDTETPEEGAGTSSPETLATMAMEFRRDIVMGAIVRLILRAFCDFVRVQKFSRHGFEQLQVDFAYVRQKLWYFVADEHMLNTCIEDIVTAAVNQCAQPKLLDPSVVRRICEEMQ

SEQ ID NO: 164147 - protein, 27 aa, Heterodera glycines
FNFFFFFFFFLFFFFFFFFFFFFFFRT

SEQ ID NO: 164148 - protein, 56 aa, Heterodera glycines
RRQNILMMQLRKISRQNREMREVIAKYQQIPNLLQAIKSVFYLPTNFINKFKIKII

SEQ ID NO: 164149 - protein, 116 aa, Heterodera glycines
VSLAIFYSAVFSAIGAPVEPSTKEREKHGVAAHYLKAEDEKLEKIKQMLEEQSPKMSPKGKQIATKFVEILLNKKLTYEEFRKEILKLDNETDAKTNDEFAKSEFAKQMSLIEKHS

SEQ ID NO: 164150 - protein, 175 aa, Heterodera glycines
NLAFQSIQMGCYSCVDKWMCCCGFHMTAAALVIAWIWLISAISMVPSVLISIYYQAFNWFAFVSMILLFAQSVPIIEGEMSGKRTHQMYLPFLVISCIQLAFTMIGGVVMFFTLDQMRQQMGGYSTGIILGYLFGLLLPLFIFFWCYSIVFRAYKFVKEKNDEKNRHNAKKDIQI

SEQ ID NO: 164151 - protein, 276 aa, Heterodera glycines
MLSETVKIGFIGAGKMAQALARGLINSGRYPAENLMASCPKTDESLLEQCKKLGIGTTSDNTRIARENDVIILAVKPMNISKVTSEIAPNFRREHLLISIALGITLRYIEQLLPSKSRVVRVMPNTPAVVGAGASAYSMGSACQDGDSKVVQDLFSTVGYSVEVPEIHLDPITGLSGSGPSYGFSMIEGLADGGVKMGLPRELSLKLAAMSLYGAAKMFLETGEHPAVLKEAVQSPGGSTSVDIHELEKGGMRGLLINAVEAASERSRRTGEAALP

SEQ ID NO: 164152 - protein, 209 aa, Heterodera glycines
KHISRVARMAKEEFGFEQVLVWNDMFEKIPVALLEEYKLGSLIVPVVWGYKTDVARPGYFPDGLFERFSQVFDNIYFAGAFKGADGISQQFVHIERYMQNLRSYQKLYHQNEMYLKDRLTGLILTGWQRYSHTTPLCELLPAGIPSLARQAIFVSQWMNKREERTDQFMQEFLNCSGRHSTSATKFVRKGFTFPFVFEFKFCDCQFPGC

SEQ ID NO: 164153 - protein, 171 aa, Heterodera glycines
LQLTYFRNQGSFSLTYEASITRLFREGRTETIRSCTNESCDFVRAMLDPQQKNEERLRLLRLAAERHQNLTRDAMCGKGVDRHLFALYVVMRHLEESSPFFDKIFPPQYLLSTSQTPLNQFDSEQEGISMAQKLKLVSAGGGHGRYLTVAAMFRGRMSMREVDDQMMSVQN

SEQ ID NO: 164154 - protein, 58 aa, Heterodera glycines
AAVPIEFFDISLIDFHQKLLFYGRSQKFRVIFWNFCEIGCGGVSTTTKKPRFLAAISL

SEQ ID NO: 164155 - protein, 170 aa, Heterodera glycines
MSSLPNLNHLHVSDAYRSSTLYKYRRDWDLLDSAISDHSHRGPGFHWVDRRFRARRFMNTDPIPDSLGLDYPNFWSRYKWYSDYLEPRHWRRHRDPNYDRPLWNSWKPYILDGKNQKQAIDMYRQGLVSFAYLDKNWITPWALGRKEKDWADIYPPAGKYGSRRYMYSWA

SEQ ID NO: 164156 - protein, 81 aa, Heterodera glycines
MDCCHIINCQPYKSHFFKEEMDRDDDKTVERAVRESPIVVSESSATDEDDSAAVSAYNKNNRPASFTEIYGNELKGIKLQF

SEQ ID NO: 164157 - protein, 109 aa, Heterodera glycines
LMDNSVASSAGDSPYDTPLEPFLVNGPMSLSQFVQTMEDHHKQCVRKLYAGKHRGYLLMPVELPNPNDPNGDRFSGQGHVLMEDLVWQLRGKTRNATHGIIMFYVIRNL

SEQ ID NO: 164158 - protein, 181 aa, Heterodera glycines
FCTALFARWLEKRQRRKMRSSRSHSIIHSPRSPPGDGKNKRLFIFIKIISIYFSYSSSPGPPPLSYRIRTVSTSSRLYNTITVQPSVTTPFGPTRIVKRKDEETTPLAEATTPEQRKSRRRWSIRGLMRRVSRFPANAASFSDASTALMRSSRSHSIIHSPRSPPGDGKNKRLFIFIKIIS

SEQ ID NO: 164159 - protein, 44 aa, Heterodera glycines
KSLGTAPPTTLAMCLCWKSKPFKAKDDNCILKSDGRRSNGDGQN

SEQ ID NO: 164160 - protein, 83 aa, Heterodera glycines
VLLKVISPSVRCSMAPLVVVHTEPLLEEFRAPFCSAANFWRFLSIFFSISLSLLLCFASQARKNEISKDFKLLGSLASVQHFS

SEQ ID NO: 164161 - protein, 156 aa, Heterodera glycines
PFGPFWRYAGTHFVGEEYFGVKTGGFDTQRETIREKWATEFPAHSSPVLAFSSAPAAFPVRPDHRFIQRFVQWNDRIKQKAIEFASRNFGHGKAFVGIHLRNGRDWENVCQFLREENVMGKRQLFASGQCTGPEEENGPLTADACDPSMDIILEEV

SEQ ID NO: 164162 - protein, 18 aa, Heterodera glycines
FLAVQIYYIYILRTKQIQ

SEQ ID NO: 164163 - protein, 85 aa, Heterodera glycines
FNFFLLIFFFLLFLFLKISHSSSSSVATDGQCAHIQLPLFAFWLCEKAFVQAKSKLPQKRRENLVMRRQSKKINNLNSNGLRYFL

SEQ ID NO: 164164 - protein, 136 aa, Heterodera glycines
  unsure (1)..(136): unsure at all Xaa locations
TLHFYASSHFVDGLGNKLKTAVNKGNHMILYRPKPLLFATVLXGLPVFVTEYGTCEASGNGNLNSGSMSSWXWSLLDQLKISYVNWSITDKSEACAALTGGTSAANVGTSSRWTQSGNMVASQHKKKSTGLSDQLN

SEQ ID NO: 164165 - protein, 84 aa, Heterodera glycines
MRTFLFIAVVGLMLAVILENVNATGKNSPSKGKPSPDSTNHKKDHKNEHPKYEAELIYEQGNLQNHATGNTFIQQSQNFYLKLT

SEQ ID NO: 164166 - protein, 148 aa, Heterodera glycines
LKRFNVYGGKNRLDVRPKPRVDLTQYTMKKESIIYDLNGIIEHIGGGINFGHYICAMRGFKGNWFKFDDSERRRVSLNDVVQNMDPYILFYTKISPSPINQQPHQRRSFGGFAPSTPKQARLNSFPSHNGGTSLPKRFNNTFHRSFIS

SEQ ID NO: 164167 - protein, 21 aa, Heterodera glycines
FFKLKHLLSTNIKINNKCGTI

SEQ ID NO: 164168 - protein, 103 aa, Heterodera glycines
FEYIIYSFENGESGANEINIIIIVHYYFINWLAPLTVHLLPNTHPPPKPAPRAPIELPNQSNWRFIRSGAKTPAEQRDTDRSRRRRSKTEGRRSERRKGIVFN

SEQ ID NO: 164169 - protein, 166 aa, Heterodera glycines
MAKFVAIALLSLTIVSMALAKTGKSQTADEVEGFRNMNIGDNNKVDAGKEPAADKATKKGKAQKAGTKPAAATNEPAAAKGTKNGKAPKTKAKQEVATNEPAAANEWNDQLMGMSVEKFNEELAVLLPKANTFMENALSFINEQMEKNGIATGAAGDSCSTGIPAN

SEQ ID NO: 164170 - protein, 80 aa, Heterodera glycines
MPSKRITVPLFLLLTVLVLALRASETKIKAMEEKVMEEQDKKENAEMKKFLREQKKEEQKGTNIIGQKVGPKRNFGGFLF

SEQ ID NO: 164171 - protein, 59 aa, Heterodera glycines
SSPPPLLSFPPPCPPPCPPPPCPPPPFPLPPLPHVPPPLPLFSFFPTSSSAAFFSFFPS

SEQ ID NO: 164172 - protein, 110 aa, Heterodera glycines
MENIEITHEWSGQQWDWPLQHNDGVVKVHNTPEKWEVGLDVAFFTPNEIEVKVVADHLNIHCKHEARSDVHGSVSREINRSYKLPNDVNTGTIKSHLTQNGVLRVSAQKK

SEQ ID NO: 164173 - protein, 182 aa, Heterodera glycines
MNGQIINSDELKIVFTHKALHTLIAYYSDVAVPTGTTVNRDGCGLTKRRFLCPSVKTKEQMIFEIDFRISATIGEKIMFGKKHDGSTDDLREATRMILDMVNSGMFYDELGLREFTVAPPGPALKNKLDKFVDRKLNECVARGEKLVNNKKDEVKDLAEHLEASDGWHLNEEQIHQFFKRRN

SEQ ID NO: 164174 - protein, 188 aa, Heterodera glycines
DHWYGERARMINGTDAELFGPNLMDAPKLQIFIGQLCRSFDLEVRQPALTAGLPVFRYAQPDSALDIAVQRSQGFCNPNSPLFFNESVQPVGCAPSGLLDMSSCFPGSPPIFFSASHFRNAHAALRHSLAGNFSSPTDSDDLSFFDIEPIVGAVVGVQQRYQLNLGMQRGNFRMTKNMSNLVVPMVWL

SEQ ID NO: 164175 - protein, 394 aa, Heterodera glycines
MCRLQATHLLARLFLLLALCTALVSSLTAVAPPFGQLSVSGTNLVGANGQPVQLIGNSLFWHQWYPQFWNADTVKALKCNWNANVIRGAMGVDEGGYLSDANTAYNLMVAVIEAAISNGIYVIVDWHAHNPHPDEAVKFFTRIAQAYGSYPHILYEDFNEPLSVSWTDVLVPYHKKVIAAIRAIDKKNVIILGTPTWSQDVDVASQNPIKDYQNLMYTLHFYASSHFTNDLGAKLKTAVNNGLPVFVTEYGTCEASGNGNLNTDSMSSWWTLLDSLKISYANWAISDKSEACSALSPGTTAANVGVSSRWTSSGNMVASYYKKKSTGVSCSGSSSGSSSGSSSGSSGSSSGSSSGSSSGSSSGSSSGSSGSSSGSSSGSGSASISVVPSNTWNG

SEQ ID NO: 164176 - protein, 159 aa, Heterodera glycines
MGFSKTIAFLSLLALFCATIAEENGATEGTEAEATTVPTLTAAAEGGKGGEEEVTTAKPTETSETAREEGEEKHKANEGKAIEGSGTRSLLQKVTCMLFGFFPFRAGCPGKNDIKAESSSHVSSTIMIIEEKEDSESDEQMDGAGGDEEKGAARDNQME

SEQ ID NO: 164177 - protein, 272 aa, Heterodera glycines
RVLDSSEADCIFLVGGDGTLSRALVGLSQNSAPLPIGLFPGGRKNIAFWRIFQSKNQSRDSKSVRMFCESAMALIEGENRLVYPVKCSITEEMNDSPSDHQTVNTPNTFWLLSDLCAGWFEHCEQKAPKLWWWGPLRYKFVYFWEFLKRKPIPLDLRISYEEFCPGCNRCVTPVKQKNLTTLWSFFSHLLWSSPNDSTKIKVNSDFALVENPNCGQRREANVSGANVRLNVEQTENGSKLKLRVGGAGDAFGRWAAMRFGWNSVGVANGESK

SEQ ID NO: 164178 - protein, 66 aa, Heterodera glycines
SFDQSNRCGKRESEPINVIRDYCFVSILSLFCYSIFVIRRTVIRNSCIIYHHFDKNCLRTNRQKPH

SEQ ID NO: 164179 - protein, 176 aa, Heterodera glycines
ANDAEVLTSLIQELADSLKMPNGPKLNADHLRIFLKDGATRALIATATKDGETTVAGYAIYFIAPSTEFGKVFFLEDLYIRPDFRRQKLGSQFMTELKKFSNEMACDVFQWNVLANNVNAIRFYTSLGARNLTNVDGETGFSCWRIESNQFEAIIRNSKECLPHIKFAVFSLDAEN

SEQ ID NO: 164180 - protein, 107 aa, Heterodera glycines
SFLRQRPPSLPATILSKSLHTKPFLLTPTVTKFSKRNWKNIRLIRSNWRILEHLRRCKTFLSPAMTSPMNLACFSVPFVQIRRLIGHKIVTNNNLFSFIHFRKLFSL

SEQ ID NO: 164181 - protein, 69 aa, Heterodera glycines
IVLPKLNSVPDGFNMRTIIALSKALITCGNFPCNFPYRCFQILSTDESIPIEHEMRGQKRVAYYQVGKK

SEQ ID NO: 164182 - protein, 83 aa, Heterodera glycines
MEAVCKIYEEHLKKLNPDVPCIQYDISALFKFIDRLADLSCMVLDKSVYVPKGEDFIKEQIFILLRGQAASNAAKKCPAEGSL

SEQ ID NO: 164183 - protein, 29 aa, Heterodera glycines
FPFIKFIYIKFPKNKNPDNINCEVRSSLM

SEQ ID NO: 164184 - protein, 99 aa, Heterodera glycines
IFQLQFRFDDQYPFSSPEVMFMGENIPAHPHVYSNGHICLSILSDDWTPALSVSSVCLSIQSMLSSCKEKKRPPDNDLYVRTCSKNPNKTRWWFHDDKV

SEQ ID NO: 164185 - protein, 141 aa, Heterodera glycines
TTAPPAVAYQRVAGVLAVLAELLQPIKVKDTHIEGITTEPNPNLNALEGGGDSDGGGDSNGAEGNGEEAGGPMKGSSSGGFKSAGAPHVRGGSFMRGGRGGSGPPGGRGGMANRGGFGSGRGRGTPGGSRGGGSRGGGQRG

SEQ ID NO: 164186 - protein, 141 aa, Heterodera glycines; identical to SEQ ID NO: 161711

SEQ ID NO: 164187 - protein, 87 aa, Heterodera glycines
MRTFLFIAVVGLMLAVILENVNATGKNSPTKGKQSLDSPNHEKDHKNEHEKYEAAYFQSLLFFYMSKVTYRTMLPVTHLFSNHKIFI

SEQ ID NO: 164188 - protein, 402 aa, Heterodera glycines
AEGDVFRGLQVVEFACNAASLLLGEHLPNIAKDMETYSLRLPLGVTAGICPFNFPAMIPLWMFPLALVSGNTMLMKPSEQDPGATMMLMELAKEAGIPDGCVNVIHGTRSAVTFICEQPDIKAISFVGSDQAGKYIYEHGSKFGKRVQSNMGAKNHGVILPDANREHTLNQVAAAAFGAAGQRCMALSTAIFVGDARGWVSDLVERARKLRVRPGWEAETDIGPVISQKAKERICELVESALEEGADVPLDGTNVTVKGFEKGNFVGPTVITGVKPEMLCYKEEIFGPVLCVLETETLDEAMDLINKNPYGNGTALFTRSGIAAHRFVSEIDVGQVGINVPIPVPLPMFSFTGSRGSFLGDANFYGKAGLNFYTQIRTVTQLWRSEDASTEAKPQLSFPQFK

SEQ ID NO: 164189 - protein, 25 aa, Heterodera glycines
IICCFFLFFVIVIEIPGCELLLPVG

SEQ ID NO: 164190 - protein, 134 aa, Heterodera glycines
MRTFLFIAVVGLVLAVIMERVNATGNNSPTKGQTPPGSPKGGHGNNKSPTTPHSAGSPHGTQHGNQQKNATGQTPPGSPKGGHGNNKSPTTPHSTKRETELIIEKGKPSPDSPNHKNDHENEISNLQNRATGQS

SEQ ID NO: 164191 - protein, 123 aa, Heterodera glycines
  unsure (1)..(123): unsure at all Xaa locations
AGSERQAKINATGDRLKEASKINLSLSTLGNVISALADXESPHIPYRNSKLNRILQELLGGTAGPTVGAEQPLGKDDKINVSLNAFVGSWQWRRASEHSKQNSATLRSSTAHCRRSPRGWANG

SEQ ID NO: 164192 - protein, 66 aa, Heterodera glycines; identical to SEQ ID NO: 138838

SEQ ID NO: 164193 - protein, 171 aa, Heterodera glycines
EFRVAIEKGDAAKFDGLLRESPRFLVNTSNDLPTILHIGMRCNAMHIACRSSNVHAVRQMLALVQSGEWLRDAYGTDACVKERSDNLLDALLNTPDKIENNTPLHYACRQLCEPIFRELIGHEQCHRSPVNSHNERPIDVLGRGTRGSGGAGRQENKKVFDRMYVALEGSL

SEQ ID NO: 164194 - protein, 80 aa, Heterodera glycines
LSQDSRAKGVTLQNDGLSPIRTDRHPSGQQPRRIGTKCEQCRPRTAIVKTLQWNFSLKNKNDLNGRMKTLKIIKKFILNI

SEQ ID NO: 164195 - protein, 145 aa, Heterodera glycines
TDLLADPRSKLADWFRPGTNRPPIPTDKGGNLFLDRDPKMFRHIIGYLRLKKERCAASLALPAKPDDLAKLIGECEALNLVELRELALEMLQKYVRTEEQHYVTSYVQMALRDYEAWQFEQEQKNENGTDDGEKPKRSEFDEWVE

SEQ ID NO: 164196 - protein, 78 aa, Heterodera glycines
FILKDGKSIRSYFTNSDKNLLKNGMKLRKCGLAKGKKKIQMRSEFNLLIAEFFESVGIIPGVYRKGEARNIFYTNTIH

SEQ ID NO: 164197 - protein, 100 aa, Heterodera glycines
FFIETLFDLRVQHFFFYHKLFFLVFHRLSLLPFSIFHYLSHHFLQPQWPPPPWPQRRSRIIGDAMFGPPSTEFSTVPWVPAKIAKVIRKRATKKRRGDIL

SEQ ID NO: 164198 - protein, 91 aa, Heterodera glycines
QGPIAGPNGIFPCVNRPGIKCDMDAAYIAAEAIVCFIEDAGQTYVEFSFERRCPVQQRKWAQPDAEQAECRRYFAYLLHGPQKMETPKTGK

SEQ ID NO: 164199 - protein, 52 aa, Heterodera glycines
EKRRMTRHLQPAHCDGPFRCFANFNFKIAYIPFSFQMICLSFLILIFCFLSS

SEQ ID NO: 164200 - protein, 175 aa, Heterodera glycines
PSNQGMNQLALPRKAKKTNKTNAIVPVQNAASFGDRGYIPSSEIILKTKQKRRPEASAEEYIKFVKNAVNSLNKSDNVHFLTNGFSLVGKNAQQELQRYHIYPRNRLMIGGLMELIANRKMKSADELEYMVLEKVHMMEVELNGGRLQLEPLGVTFVTGVQIYINLQTMEQQFAS

SEQ ID NO: 164201 - protein, 216 aa, Heterodera glycines
FLDDKEKENGTKNCEAEAKKVELEDERKQKEVEQNNAGKRSIAVPQNQLSVEFLANIEGHRGTTNIVRFSPNGTYIASGDADGFLFVWKLEQEVLECEVQMLEEPATVRQRDADPEMDIPPNKENWARAFRSPIRHDGDVTGISWSPDSQMLASVSMDDSVAVHRADNGSSNGYFGRNERHKTSLLPPNRISINSPSSGRQFRNSSKSKTCHNYSY

SEQ ID NO: 164202 - protein, 80 aa, Heterodera glycines
SLHNFFVAFFVGMFAITGVGICLSVCALIAAGVSIVSAARRLMPVVIFCAMTFVFEFFIFSLRFNFSIFHFRSAKILMVL

SEQ ID NO: 164203 - protein, 49 aa, Heterodera glycines
ECQIANWRNFTRYFKKYTGNAFFVWFIMSLHNSHAFPTNPNILLSKKRF

SEQ ID NO: 164204 - protein, 149 aa, Heterodera glycines
TNFEPNRTYTLTGIYEQSTKIDPPQFETNFVIMHKSEQTRQIMKWALLCAAEPDCMVPIGQTKACIYTATAPNLTCHRQDQGLMEILRYNMEYRQEIENPSFLTQLNPAHPRSSNRPLQSSGISGFFDLLRGKHFGGSQSEWLQRVQCC

SEQ ID NO: 164205 - protein, 123 aa, Heterodera glycines
REARMQSVSDVPLNLTKEEMQMAKERFNQLDKDKKGHITVNDIRRHFREHNNKIDERLLHELLNEVDLNKNGELELAEFFQLYSGLKSGQITQNRLVRYLDELGGEKDKTKPVLDVVRSGGGF

SEQ ID NO: 164206 - protein, 166 aa, Heterodera glycines
CRLQATHLLARLFLLFALCTAFVSSLTAVAPPFGQLSVSDTNLVGANGQPVQLIGNSLFWHQWYPQFWNADTVKALKCNWNANVIRGAMGVDVASQNPIKDYQNLMYTLHFYASSHFTNDLGAKLKTAVNNGLPVFVTEYGTCEASGNGNLNTDSMSSWWTLLDSL

SEQ ID NO: 164207 - protein, 240 aa, Heterodera glycines
DLREGMALQNVQARARMVLAYLHAQLTLTKERRKGSLLILGASNVDESLVGYVTKYDCSSADINPIGATSKDDLREFLCHANANHKFPHLQSVIHSVPTAELRPLKDGQIVQTDEAEIGLTYRELSTFGKLRRPGCSGPYRMFQELVHIWHPARSYDEIADKVRIFFRRYAMNRHKATVATPAYHANTYSNEEHRNDHRSFLYPDMAHQFHRISELVEMLKKRDQTLQQKNSNGQRTTAD

SEQ ID NO: 164208 - protein, 107 aa, Heterodera glycines
MRTFLFIAVVGLMLAVILENVNATGKNSPSKGKPSPDSTNHKKDHKNEHPKYEAELIYEQGKPSPDSPKYDSPILAGSSGSPKKGKSPNADPKKAASHLVPVTPGKV

SEQ ID NO: 164209 - protein, 64 aa, Heterodera glycines; identical to SEQ ID NO: 139695

SEQ ID NO: 164210 - protein, 180 aa, Heterodera glycines
  unsure (1)..(180): unsure at all Xaa locations
SARNGVQKRTVSPSNSVGSSNGSGSVSSKFQSQDLISELSDRLSKRKMTVEASSNANGTPNQPNSQTLPVNNAKGSANPYGRIPSVSSLSSQDDATAGGGTPATAGAASAAQDSQLTCETVVKGPTQLTCEPMVKGPTSSAHNDIANSEARPKATTTSSDFERMXGELLELFSNELQNLK

SEQ ID NO: 164211 - protein, 86 aa, Heterodera glycines
LGQLIANFYIHFRNTLYDSEIFQLQFRFDDQYPFSSPEVMFMGENIPVHPHVYSNGHICLSILSDDWTPVTLAVHKMTDNPQTGTL

SEQ ID NO: 164212 - protein, 152 aa, Heterodera glycines; identical to SEQ ID NO: 160444

SEQ ID NO: 164213 - protein, 181 aa, Heterodera glycines
NQKGKGSDQIATDQRGSDQKEWTDQRGIFINCEPGLAEYYDQSTIKFGFKPCQSQKTFSIDPNYLPLFNGNLLQMMEMERKQRDRSADDHDFVTVQTIRHILENNREAENIVFVTHMQNSGLLLELMGAEWAAVGQATISKLVKYEENVGIGKPSDVLQQFRLEYASGVTHLTERKDLRPR

SEQ ID NO: 164214 - protein, 193 aa, Heterodera glycines
  unsure (1)..(193): unsure at all Xaa locations
RSSILPFPLQVYYSLFTSLLSVFLAKTSINGLLHRGRMFIFSHSHLKVFLPIPDXGPPSGCQLLDIGARDGAVTAKVTSICVVEASKVMEWRLARRGFTVLPMDKWQRSGPYSLITALNLLDRHHDPKKLLNSLHELAIEHNCPILLSVVLPIRQFVEFDDKIVSAGRKLPASDIPTEGTTFEAQVNSIIQIG

SEQ ID NO: 164215 - protein, 176 aa, Heterodera glycines
NIHDEFPSYVKACKKYDPNWEPKFVYCIVDKNHNKRFFVKGQQQVENTAPGAVIDSKVVRVDIHEFWMQSHVPLKGTSKMPQYIFPVNDPKANNNELQGFLLALCCSWQIVTLAPALPTPVRQAKELAKRGRANFGELKRTPQYIPRAENQQIDYQQLNRRLCYNGHIFADTRFNA

SEQ ID NO: 164216 - protein, 117 aa, Heterodera glycines
NQRKRSHRNKQGMAKKIAKISIECKLELDEEKYVESFCPAMMTVVSKWCSGATFAEILETSDIFEGSIIRCMRRLEELLQEMVNAARSMGDRPLEQKFEQARSLLKRDIVFSASLYL

SEQ ID NO: 164217 - protein, 62 aa, Heterodera glycines
  unsure (1)..(62): unsure at all Xaa locations
YNFFFFFFFFFFXYNFLIFIIVFYNSGFNIPIFQLICLANCAVARRLRPAGLNGPTPGSKAS

SEQ ID NO: 164218 - protein, 182 aa, Heterodera glycines
FVLIPLLPGFEGDIGATSYSALLAVLHWTMLSIAKGDHSLIQNLQRAGVENVQNYITFCSLRTHSQLYGKSVTELVYIHSKLMIVDDVHTIIGSANINDRSQAGNRDSEVCLLITDHEFVDGRMNGQPFRAGKFASSLRMRLMREHLGLLEQSLPKTSPERAAEIDVIDPTCPSFYEDQWCQ

SEQ ID NO: 164219 - protein, 53 aa, Heterodera glycines
MKSFILAVLFSFLFMALMMPLVSSEESETKMKSPIMEKHGNGGDRLSDYLLKL

SEQ ID NO: 164220 - protein, 195 aa, Heterodera glycines
YYEDADGLNGNLSYGGTKGRKEWEENADPHSSDLSLYNIADGNKSSSGISSCCTTSSRSCEPPETNRFVLAKKQRHFKAGDEADPKMPTHRAQFPFMPRHSEQIELQKGDAIRILEKYEDHWCHGINLRSGKKGIFPEAHVVEIDLVDEICRSVLPDGTNHANKIERDTFYLTMLASIEGAHHRGNDVVMQAINK

SEQ ID NO: 164221 - protein, 65 aa, Heterodera glycines
GKVDGLDFDAFTRQLFDRWFGAYTRCGTCKNGKCSRHGGPLGSSGWEHVFSGEWRGEIVDGHHSW

SEQ ID NO: 164222 - protein, 181 aa, Heterodera glycines
  unsure (1)..(181): unsure at all Xaa locations
GDHKLKKMFFSSKSVLLLLVVIALDTFTSSQPIGEGNGNADKAVKKKSSSKGRVGTVAKGVFTGTLLATTGSFAQVADARPVVQINHVIATPSVPPPPSARMTPPVQESAMRRRANVVRKDGVPDPNAPSTGFEVPPLPPGGFNRSASCGTNGDGTPMGPCGYVPIGTTGLPDEYKVNXDE

SEQ ID NO: 164223 - protein, 246 aa, Heterodera glycines
IMSDSAANMKRAFVERDENENRILPIPNGPCAAHLLNLAVQEAFKRDESISSLLAKTRHIVGRFKHSNTAFSELKKIQKLLDAPSHTLLQMVYVRWNSALTMCERLTEQRTAITQYAVDNNEFELLLKNDEWEQIEELVGVLKCAEEATKRFTAEPISFVIPQARALHDELYEMKIVNRTVETIRTTLYFAVERRFFGLANLKEYALATFFDVRFKDKVLTENSATFRARVTVWIKNELKEWENDN

SEQ ID NO: 164224 - protein, 111 aa, Heterodera glycines
TIPKQHTLGPAPKWRKGNVPNGYSPLPAAAISFLRMGRCRRKFKRNVDHQPNEGIQIPFTFACSNKSFNKWRTLGFGFNVLNLSPPFDVHLFFVFSRNSSPTAISLFILYV

SEQ ID NO: 164225 - protein, 88 aa, Heterodera glycines
MNWCAVLCFLLLIEVAFVPIVNSAPLEREKRLTASQLGKGAVVGAGVGLVGAALYAGGKKFWNNRKANAAAADAGGADAANLKTKGRK

SEQ ID NO: 164226 - protein, 308 aa, Heterodera glycines
  unsure (1)..(308): unsure at all Xaa locations
FGRFLLDVIGRCGFSLDLDTFDEENIFVKQARTIFDFTRKGQKLRMILGVFFPCVSLLYENITGKSFAFAMDEEFFMEMMSDLYEKRRADPEAKEKYADIFQLLMNAVDDEEFTISADDAEIIHSELRSNEXSRNNRGKHXDQETELFAQSFIILIAGFETTGATLSFAAYMLAIESEIQEKLREEVIDVLGENEMITYEHLKRMNYLRAFVQETLRMFPVAPKMNRVCNSDCVINGVPFERGDLITXPIYVIQHDETFFPDPFKFDPTRLLPEXKAEIDSLAFLTFGLGPRNCIGMPCAEFQMQGAV

SEQ ID NO: 164227 - protein, 206 aa, Heterodera glycines
MSSDFGNPLKKFKLVFLGEQSVGKTSLITRFMYDSFDNTYQATIGIDFLSKTMYLEDRTVRLQLWDTAGQERFRSLIPSYIRDSTVAVVVYDITNANSFHQTSKWIDDVRTERGSDVIIMLVGNKTDLADKRQVSTEEGEQKAKELNVMFIETSAKAGYNVKQLFRRIASALPGIEVEKAADAKQVVDIGPIKPRQIVTEEGSCWC

SEQ ID NO: 164228 - protein, 183 aa, Heterodera glycines
TESQKALEDLDKVQTELDTLNETASDEILKVEQKYNQMRKPFFEKRTHFIKQIPNFWVTVFINHPQISNILEEEEEECLHYLTKVEIEENEDIKAGYKLKFSFDPNPFFENSEIVKEFNWTAAEPNSVTTEIKWKQGKNKLANGTGSEEQTFFKWLCQNIEPVSDEIAEVIKDDIWPNPLQYF

SEQ ID NO: 164229 - protein, 116 aa, Heterodera glycines
MRTQSIFSIFFLLLIFEVINSFPSKSSESGEPPANGAEVAQSRKKRQAEEVTTEEPPSETNDAEGAEDHQSAAAGNGKAPKNKGKKNKSDSSDSSSSSSSSSESDEKKKLKKKNKH

SEQ ID NO: 164230 - protein, 91 aa, Heterodera glycines
GLPMFVTEYGCYSADGNEKANLEELKKWMELLDGYGISYAAWHVADIGEQSSILTKTSEVNNICDPAHLTNYGKAIINKLKSQNNGVKCSG

SEQ ID NO: 164231 - protein, 85 aa, Heterodera glycines
ERQLISLLRLALSNPRIILIDEATAHMDENNHKLISQLIARMGCTVLAILHRTTGLAEFDWIIEMSNGQIARQGHPSEFFESEAQ

SEQ ID NO: 164232 - protein, 187 aa, Heterodera glycines
  unsure (1)..(187): unsure at all Xaa locations
LFVNSISAVSERNMEYVVQFRFQQEWLDDRLAYSRLGDERSFAHLFVARDQTIWIPDSFFQNERSGHYHMLDQENRFVKIRADGRVTYNRRLTLTLACNMNLLRYPMDVQSCLIDFASYAYTTNDIIYXXDQVGVEIAPTANGALPNFEIASLENNTCDSVTNTGTYSCLRVNLSLRRVFSFFLLQL

SEQ ID NO: 164233 - protein, 178 aa, Heterodera glycines
FFFFFFFFFFFFLYNFFFFFFFFFNAKEFISRERSLAFLCVVRLNCAFLVIHPSFVHSFLFVLPICSSVRPSFTTNIPNSTGKRGRSTTRRKGKRRPIRRMRRSNTDSNVWHAPPRLDVARLRTLALRAVPALQWRRDKRLPKRERRKREAEEKTFCEDGPREAVGLRVFGSFVLFGP

SEQ ID NO: 164234 - protein, 140 aa, Heterodera glycines
MTQSPRPAYVSSLLLLFPIFLLPYAVIFFIVLSFFLFLHFRNLPSPANNVANFFRGFHLGGHPASPTNAPQNTIASFKQALAEGLNFLEFDIGLTADGVPVLMHDHTLERTTNMTGLLRDYNFPDLVAQCDCGAKFKRVS

SEQ ID NO: 164235 - protein, 135 aa, Heterodera glycines
GFNIETLEFMGWKLNCWDVGGQKSLRTYWRNYFERTDAVIWVVDACDVCRLDDCFNELHSLINEECLHGVTLLVLANKRDLPGSINAHEIEKILRLEKIKHHWRVYETSAYTGHGLLESLEWMVQDVNSRVLVPD

SEQ ID NO: 164236 - protein, 83 aa, Heterodera glycines
MASSLIKLLSLFLLVLCIGMAIEQTQAYYGWGGYGYGYPYGFYGKRQAGFGPSGNVGIFGGGGEGNANGGGEGRGGPSSPNNF

SEQ ID NO: 164237 - protein, 174 aa, Heterodera glycines
LEVLSLDKCDLKELEEDIFENLTSLRALSLSGNPLDRIPAALSPLHSLTHLAMSSTNLKELKEGDFQKTVPGLEKLYMRKMKYLWKIGENTFNGLANLKFIDFSTSAKLRLLEPNVFGKDPPQNLSELHLQQCNFSTLSAKTLPQIYWKSLDVLKLNGNPFLCDCKLKWMVDMK

SEQ ID NO: 164238 - protein, 89 aa, Heterodera glycines; identical to SEQ ID NO: 148232

SEQ ID NO: 164239 - protein, 99 aa, Heterodera glycines
SHTHYFSCTLLYLFLGANSKHIQEQITRILFERLVALRPHPWGLLITFIELIRNQRYGFWKHEFVYCATEIERLFLSVANSCSVSGPKVITQTGFKLLL

SEQ ID NO: 164240 - protein, 150 aa, Heterodera glycines
PAVASTNAIIAGSCALEALKLASNISCSLNNYLNFANVEGICFNVVALERDPECLVCGQKSVQMYSVREDCTLSGFLDDLKDKYQLQNPSIRAGSTFLYEINTLMPEMETASRKNLCKTLKELHVTEDSELLVADEALTRSIVFRIKYSK

SEQ ID NO: 164241 - protein, 83 aa, Heterodera glycines
IAAVAQGFKVFVDGASVCDFTFRASAPPPTEANRLTIVGDVGVQKFIFRNQKKLIFSVHTIGKTFHFRIWLDHPIPCFVLCTL

SEQ ID NO: 164242 - protein, 123 aa, Heterodera glycines
  unsure (1)..(123): unsure at all Xaa locations
MSSLLLSIFPIVFLVCCNAMPNFPCCPGSQQVVAVMSKYIDTFSSAADXSTVCSTAKSTVDGIKNELSSRGGCQNGGEAQIVDGIDRQLKNIAKMEINYEDECPYNLGFARAMFDLAAAAAGH

SEQ ID NO: 164243 - protein, 168 aa, Heterodera glycines
VVAQIILMLWKRRHFRSYQFATLVGLWLIPFMVSLKNGWWRFILSWTVFTSSIFYVWRRVNQPAISGSTPRLVYKYFLFMHKLSYIFGIVGYFSLVFTVIGINSVFGISSNLSLDFGVHLLFYGLYYGVLGRDLAHSLTDRLACKIGYFTHDGLPKRVLESDMCAVCG

SEQ ID NO: 164244 - protein, 115 aa, Heterodera glycines
WLNSNSIPISGISSSPAQCSINGKSYGKALRMEYRMLSDEQRDRFHSALLKLKHLYNGCSEYDRFAFLHSGIDKMPSAHGGPTFPLWHREYLKRYKWGTAFIFQIYLQFGIRPSF

SEQ ID NO: 164245 - protein, 195 aa, Heterodera glycines
MKDIATEESIAQRRLNLKANFMRQLQIRRGVLPSEIPPVGVATNAVPTMGRKFRKPLESRFPPAKPRFGLGMTAADFEDKTDNCSSLAKGPSLTETNAPKGRNVRPKAINCYINPSQSVSTWPTSNDTDSDGQSPSPTSSASVTSFGSSLTTATDPLVAQHVDQNGTIFFPTSSTPSDHGQSYDETPASSVLTFD

SEQ ID NO: 164246 - protein, 247 aa, Heterodera glycines
NILSNYIINLISNKYCRFSQAVVACTAEDPQAQLVSIWDEAENRLISQIITRPLARSLQTYNLASPIFNTFWIGLRRVLVGNRYQSTWTNGSAAIFGNVPEITTAASRNTSPWAAGQPSGTNKYTDPTGAKEECVHMLNAEGRWNDARCEIQMTGAICKKAAQSVGSSGTVVSSAVVFPSSAFDLCNPSVSQCNGFGWTISSGKCYKVIEGLMNGTQAVVACTAEDPQAQLVSIWDEAENRLISQII

SEQ ID NO: 164247 - protein, 162 aa, Heterodera glycines
MRTFLFIAVVGLVLAVIMESVNATGNNSPTKGQTPPGSPKGGHGSNKSPTTPHSAGSPHGTQHGNQQNHATGQTPPGSPKGGHGNNKSPTTPHSAGSPHGTQHGNQQKNATGQTPPGSPKGGHGNNKSPTTPHSAGSPHGTQHGNQQKNATGQTPPGSPKGG

SEQ ID NO: 164248 - protein, 185 aa, Heterodera glycines
LQKYLPFLLKEISREEGRRQFLFLHALKEVINSECGECGTVGDADEIFKKGVEQIWELLMKYCDSAEESIRNVVAECIGRLIMVNPQKYVEELLRHSADSQANVRATVVTALRFIIVEQPRPVDDFLRPVIGKFLATVRDSDMTVRRVAIVTLNSVAHNKPKLIKECLPNLLPALYEETKVKQEL

SEQ ID NO: 164249 - protein, 25 aa, Heterodera glycines
SEEWTVTINVVKIVKLLFFDGNKFY

SEQ ID NO: 164250 - protein, 118 aa, Heterodera glycines
MSGYVGIKFCPECNNMLYPREDKQNRQLMYVCRNCEHSEPADNPCIYVNKLTHEVDELTQIVADVIHDPTLPKTEEHPCPKCKNAESVFFQAQSRRAEEEMRLYYVCTNSQCTHRWTD

SEQ ID NO: 164251 - protein, 197 aa, Heterodera glycines
  unsure (1)..(197): unsure at all Xaa locations
FFKVFFFFILRFIFFFIIFDFSIIPVVFLTLFFGVQIEKIISIFFLFFYSFFLGYFFSFYFFXDFNLNFIKFLVYFDSLLNKKIFFFMVLVFLIKFPVFFLHFXLPKIHVEASTVASILLAGILLKFGVHGFSRFLISFLFSNSFFFLFIAIIGLFFCSLICLIQRDLKSLVAFSSVFHISIILIIYLVFFQLGKNG

SEQ ID NO: 164252 - protein, 38 aa, Heterodera glycines
NVSELGMVTQGGKVVWAKYAQVTNHPENDGCINAVLLL

SEQ ID NO: 164253 - protein, 100 aa, Heterodera glycines
GIGCVPLYNLMEDAATAENSRTQLWQWARHEARLEDGRTVDPQLVKMTIASETERRLVRAGSVVNRIPEASELLEKFVLEPELSDFLTLDAYDKLVSEGK

SEQ ID NO: 164254 - protein, 43 aa, Heterodera glycines
FLFFFLFFFFFFFFFFFSFVLFIFSRKSCQKFSKQLNFSHRVK

SEQ ID NO: 164255 - protein, 49 aa, Heterodera glycines
MHLFVFIFVSLSLFCPSHFALSLLDKYIVPTTSDTTVNNWAMIRYCMDC

SEQ ID NO: 164256 - protein, 84 aa, Heterodera glycines
LFGLFSVLVILMFCPLNPFDLIQRIKMSDQSIGKSIDHYSIPSDQSISVHQSKGDNLSFFRPFVIAVQFILFQNIPIESECWWM

SEQ ID NO: 164257 - protein, 45 aa, Heterodera glycines
QGGGHRVVVFFFFFFFFFFFFFLVFFFFFFFFFFFFVHIYLFVRL

SEQ ID NO: 164258 - protein, 154 aa, Heterodera glycines
HSLFAPFSPSFRSFFSIVPLPFLPFFAPFLPSFRSFSYHFSLLFLPISLFFLHHLFQSFCFALIDPLLKLHSQILAHSFCEPGSVAQFLKHLSLVQLRRLIRLCSFIRPLTSEGKALATAIWEGCSNERSTERRSRTAKKSFVNISKLKITGRV

SEQ ID NO: 164259 - protein, 63 aa, Heterodera glycines
FLADLKPSIACRFSAQQSTNTVFDSLQKNNSLPKSFLQPLIANIISCRFKAIHCLPVLGTAKH

SEQ ID NO: 164260 - protein, 58 aa, Heterodera glycines
PLINCLLSANCLAFQLFDAPLFFYGVAEVSFFSFRFGLLSLSDSVPICPSATAPHLRR

SEQ ID NO: 164261 - protein, 192 aa, Heterodera glycines
SAEEIARKIGKVRAKRGWRRSHLPNKAQSQKTHFNNQNRRPSGDVVVLSLHWGGNWGYEISKTERDFAHQLIDSGTVDILYGHSSHHPKAIEAHKGKLILYGCGDFLNDYEGISGHNEFHDELTLMYFPVVDGKNGIIIRLDAVPMKINKMRLNRANAEDSLWLYRTMARECAKFGVRVQRDEKTNVLSFLW

SEQ ID NO: 164262 - protein, 40 aa, Heterodera glycines
  unsure (1)..(40): unsure at all Xaa locations
CYNDTLLKLFKIVSKIIFSSNFCCRKLNCFFXXXKKKKKK

SEQ ID NO: 164263 - protein, 162 aa, Heterodera glycines
MNKIYATIHFLLLLTVIANKSTNCATNGQGTQTVKTADATHDEAGKISRDSSSSSDEDDSTTAASKMLLNEANNAFSKDNDEPINQQQKMRPEANFSVKYLPPRLNAAQIDNIAQQASSMITLRTLKHVKEVFSKFAPDSWLEALEDIPLPTIRCTVKVSAK

SEQ ID NO: 164264 - protein, 83 aa, Heterodera glycines
LHHPLLQKFTSFFSRILPHMFWSFFYNQWLRFSQQKFHLLLHDERLFLFLADFMLASALITFVTFTFFGMRASYGRYAALSFF

SEQ ID NO: 164265 - protein, 128 aa, Heterodera glycines
  unsure (1)..(128): unsure at all Xaa locations
FQFSSTKFEWIPLXKTIKCRAAVAWEPKKPLVIEQIEVAPPKEGEVRIKIMFTAICHTDVFQVSGINPNVKFPTIVGHEGAGVVESVGPGVESVRAGDHVIPMPLCQCRKCEECADPRTNLCQKFLYL

SEQ ID NO: 164266 - protein, 118 aa, Heterodera glycines; identical to SEQ ID NO: 126470

SEQ ID NO: 164267 - protein, 146 aa, Heterodera glycines
  unsure (1)..(146): unsure at all Xaa locations
LYALFDGHAGRRAADYCAEHFARLFVAVFKKYVPPKSAMSVFEKSIRKVFVDTYKGIDDGFLVEARRQKPTLKDGTTATTIFLLDKTLYCANIGDSKAIVCRHKSEKSTNIPLQITVDHNPLXFDERMRIQKSGGTVKDGRVFGIL

SEQ ID NO: 164268 - protein, 147 aa, Heterodera glycines
  unsure (1)..(147): unsure at all Xaa locations
MRTFLFIAVVGLMLAVILENVNATGKNSPTKGKQSLDSPNHEKDHKNEHEKYEAAYFQKKPSPDSPKYDSPILAGSSGSPKKGKSPHADPKKAASHLVPVTPGKVXXASLKMVKKLCGTMMPTMNKPKAVVVDVEKKLWYHHAIIVV

SEQ ID NO: 164269 - protein, 166 aa, Heterodera glycines; identical to SEQ ID NO: 161714

SEQ ID NO: 164270 - protein, 40 aa, Heterodera glycines
DVLASELLAAMENEGLTIQAKQELHKMCEQNRSYSSMKKF

SEQ ID NO: 164271 - protein, 64 aa, Heterodera glycines
MASKIKPLICPSILNTDLSDLADECRRLMAAGADYLHLDIMDGHFVPNLTFGHPLIECLRNKLG

SEQ ID NO: 164272 - protein, 219 aa, Heterodera glycines
MKNFLTFLAFFLIVPCFKADNEKNKAAPRVFAEHPGPKLVDETTRWSKCQADQNLTIYDFEVETLDGKFTNLEKYKGQIVLLINVATFCAFTQQYLDFNPMLERNRANGVPLTILAFPCNQFHLQEPAENHEILNGVMHVRPGDGWKPHSNLHIHGKLEVNGANAHPLFDFLRDSCPQTVPVLGIKESMFYNPITVSDITWNFEKFMIDANGIPRFRIH

SEQ ID NO: 164273 - protein, 25 aa, Heterodera glycines
GSMFTEGISEGVIIRKIFINELKIN

SEQ ID NO: 164274 - protein, 149 aa, Heterodera glycines
  unsure (1)..(149): unsure at all Xaa locations
MRTFLFIAVVGLMLAVILENVNATGKNSPSKGKPSPDSTNHKKDHKNEHPKYEAELIYEQGKPSPDSPKYDSPILAGSSGSPKKGKSPNADPKKAASHLVPVTPGKVXEQSLKMVKKLCGTMMPTMNKPKAVVVDVEKKLWYHHAFIVV

SEQ ID NO: 164275 - protein, 223 aa, Heterodera glycines
IVVIGFKPLHLLKDSHRMGAAVFVYPIESVISGSSALYRALLKRCMDKQLFVLVRYTHKTNTPPKLCALVPQSADRIPSGCTLAREYFYDGFHLVEIPFAEKSRSMEKRLLPPDGGIGTWQLANPDQVEAAKQFVKKLTNTKFSPDDFANPVLQQHYKAVEMVALDLPFDSEQFKKEAAENDKLIPYFKNPTFEQRVAKELEEFAGICETIAETREKGKRKSA

SEQ ID NO: 164276 - protein, 245 aa, Heterodera glycines
MMTRSISPLKGQSAMFRGGSTVPMLQCRAVDIHTSSPLAGLGQRAIAVMDDGDFGSVDDVQQKYRRTGSAGTNILYRIRREELAQGKHPTVRQMARAFESFEKLQQKGNSSEEPKRKRIKPTKGGLFGLLGKSSSMEVSSMSEKNLKTPKAFRKGEHVPSEKMPGSNERTRGGGGSPSPFPSSSLPRGGRNPFKGISSRIVERVRRSLSRSKKNLSRDGGQSRDGTPSQNTIGIKAGGEVREEVD

SEQ ID NO: 164277 - protein, 114 aa, Heterodera glycines
  unsure (1)..(114): unsure at all Xaa locations
MKLSIILLLSLAFCALIIDAYPSGNGKDLEADNEKTEVKEEKMEKREAEVEEGKKEKKAAEEEVGKKEKRGSGGGTWGNGGRGNEEGNGGXXHGGGGHGGGHGGGNDSSGGGDD

SEQ ID NO: 164278 - protein, 121 aa, Heterodera glycines
FEPGNAYNPQVVCEAKVKGQRLFDWCETEERKKRINGQIDLVQAEIEAVTRLRRSLPNKSGVDFERIEHRLQSNGNGPTWRTMPKGTLANMANCVSHFRRTIHPSLLLFLFKKQCIDPFCR

SEQ ID NO: 164279 - protein, 49 aa, Heterodera glycines
VANGIVANNKFFCCVKGVRFQNLPHFICLLYVFTPSFCCYGVFCCVFCF

SEQ ID NO: 164280 - protein, 17 aa, Heterodera glycines
APNYLLITHILKLVTSK

SEQ ID NO: 164281 - protein, 122 aa, Heterodera glycines
ICRGLALAHKMPQKCRHFGHFPKSLIDLPFLSPNYPNGSLTQRIITMPITEKRVPLRMKRRKSKIHSRNVFRTPLIIPELELMKKWRNSRRNDEKPRGELPSQGEDEAIKLLLLNDIGQSAE

SEQ ID NO: 164282 - protein, 78 aa, Heterodera glycines; identical to SEQ ID NO: 152412

SEQ ID NO: 164283 - protein, 123 aa, Heterodera glycines
FTFISIALLCKHHRSKHHINAGPLDAEKSPSNGEGIHKYEAEKLKIGEVAKLNHGETKTEMDEADGHRHSLPKDRGDIVHPKSQDGVCKIHEDVKLDFNDDIFGQHVSGEERPPVAEPMPMSA

SEQ ID NO: 164284 - protein, 80 aa, Heterodera glycines
LVLCTFPHSQFGLHAGENIAGSVAVKDKRCFDRLVVQIERKSTTEKFDVLQCRKCVFNSCWLGSRTLHDQRTYLTNLRSY

SEQ ID NO: 164285 - protein, 113 aa, Heterodera glycines
MQSVLKRFLSTEAPTTKERLPSKYAWLFNIVFSEIIIFGGTYLSLLELRKNKQARLKLHKYWPSALKHFYWAEDQLSGGQLTGEKLKVADLKSWNIEGKVKTQQKEDAIYTCE

SEQ ID NO: 164286 - protein, 357 aa, Heterodera glycines
DKGHRKAELANAQRIAELEQQLVTQKGMEKQKIAQAVEEQRKLDESLSKMALEIERRRNREMTTGATQTDHLVGSTRNESDEAELDAQLKRAALAHAEHLERVIRTQKQIHDMETQQIVQETIAIERDKFGKQIENGLVKLAAIEEMLKSRATKDLENRRAKIYWTICHSLTDALANGGTAQSQKTTYYKTQLLEQIAVLKKLVQNDAFAQSVCAHFPSDDAIGRGVPTEQGLVKRFDGVYKLARCTAQIGDEGGTLWRYITSWLQSLFTFELPYAYSADDRLDLNRYDPYELLARCRHFVQQRDLLNAVRVANLIRGKSARIFSDWLKDAKFHLEVRLLVELLLAHSQASGIRTTY

SEQ ID NO: 164287 - protein, 18 aa, Heterodera glycines
FFFFCQCHWMRWARFASR

SEQ ID NO: 164288 - protein, 61 aa, Heterodera glycines
FFFFFFFKYRFFYLTNLRISTSLSFSVSISFYTSSVGQIKPNQIDSSNFTSTAASLASVTI

SEQ ID NO: 164289 - protein, 213 aa, Heterodera glycines
MAANENMQTEDNKKGKVTNDERNLVVSFIQFLRHKVSSNQCTDEQIEGLEVAIQCLETAFFVSDRNYAFQPSKPLIEIFKAAEGLPDGDQEFPKPTQTDVEKSNALKEEGNELVKSNKFEEAILKYNEAIKLNRDPIFFCNRAAAYCRLEQYDLAIQDCRTALALDPKYAKAYGRMGVALSCQNRYDHAVEAYKKALELDPGNESYKNNLSIG

SEQ ID NO: 164290 - protein, 132 aa, Heterodera glycines
  unsure (1)..(132): unsure at all Xaa locations
QRLFPELQTLSRLSDPFESEFRSLRQFSQLPAIDVNETKEAFVVHADIPGFTREEIDISLNGPVLXLKGNKEKKEEKKDETQHIQERIQSSFYRSITLPETFAPENVKASLKDGILEITIPKNAVTKKITIS

SEQ ID NO: 164291 - protein, 163 aa, Heterodera glycines
MTTNWEKLRKELNETEEKGKGNSKKRKRKVSENCNNKWKKMREEIEKNDQQKPEKAIETTISAKKILMAIDCEYVGVGLNGAENMLARVSIVDAEGIAVYDKYVKPTEEVVDYRTKVSGIRPGHLLRGVPFVQVQSEVRKLLSDNILIGHSLRNDLTVLGLTH

SEQ ID NO: 164292 - protein, 55 aa, Heterodera glycines
SFDQSNRCGKRESEPINVIRDYCFVSILSLFCYSIFVIRRTVIRNSCIIYHHFEK

SEQ ID NO: 164293 - protein, 171 aa, Heterodera glycines
MANAEEVCPTYSEAFSHGNDDGSFCTITEFKRNKLETEARKNWDRFYKRNSDNFFKDRNWTKREIEQMCAKDMELSAPLTLLDAGCGCGNTLFPLAKFFPNWTFCGVDFSSNALSLLQQRAVQIGTNIHTELVDLSGDTLGNFSSLPKADLITLIFVLSSISLEHHSKVVH

SEQ ID NO: 164294 - protein, 216 aa, Heterodera glycines
IRHNIMTGVCELSEKHSKVRLHLPLELHCELLSALPFEHAARLLLLSKAIAKNCNSLVQKQKKGWKVFSKNCIDKIMKVYHPLVSPTLKSIEEEHHSLEHSEAHQQDTYLNKRIQDSRAELSFFVGANLVRRLAKYETAGQVMTELLNSVVNMHQFIENFKKRMKEMDERFNEVKRLADRIKSDFLPRDIPSQMFPTATVWSAERLRRDYTDHLRA

SEQ ID NO: 164295 - protein, 95 aa, Heterodera glycines
KVSSTIGRKSPKAMEMKGKIGRRKSNRRRKRKRGNDQTDSLCCDGISYKYPNYPSPLFYGMPSTDRHFVHNFFTFTMKYTHIQYICIQNKQRIEK

SEQ ID NO: 164296 - protein, 139 aa, Heterodera glycines
IAFCFSTFIPFIHSIHLIIRPPPPPRQIETSRSLFPYRRYYYSDYISNPYYWSSSYSYWGRYRSYLSDYDWPSYYNRWYDPYYDSYSRTYRYRSWLLDSMEDSLSKGLAQYRQGTINYNQLYRYRSYLSDYDWPSYYNR

SEQ ID NO: 164297 - protein, 169 aa, Heterodera glycines
QMLNEWLQKKGVPSDEAAFFLETYFHEVTEKLSKQITAMEIFYQNEKQILNNFGRAFIACHETYGTNFTEKLAQIGITEKKLVQICQFLGYDDKIFDIQPIDSDVNFGLPDWKEFCPKLMANKIPKNSVVVMDKLNSVETVGMNKGQNILPKLLAKQSRGTGVFLPKNA

SEQ ID NO: 164298 - protein, 131 aa, Heterodera glycines
FFFFFSFHSLLQNDFSHNVINHYQIFKVSSSFRSSASSSLLLRLLQRISAGATFPPLRFFRSAAAPSADGGGGGTPSPAADGSAAARAAEGFSSAASEDGDESSAEHWTTKSAKRARDRTKRILNREMPIH

SEQ ID NO: 164299 - protein, 147 aa, Heterodera glycines
MEELLEKVHSKCPNVTRLYSVGRSVQGRDLAVIEFSLHPGRHQILKPEMVSDARNGEPIANAVVWVRNVTDGDGQTAIKHPVTTWITGDYFRPLVSGCYQIAVEADGYEIGIKTLNISQKDVKERRPHIVNFQLRPIEVEVPEAQIG

SEQ ID NO: 164300 - protein, 221 aa, Heterodera glycines
MFVQLVLLAIVGITFVDAAAPPFGQLSVKGTNLVGSNGKPVQLIGNSLFWHQWYPQFWNAQTVKALKCNWNSNVVRTAMGVEQGGYLSDANTAYRLTAAVIEAAIAQGIYVIVDWHAHEPNADKAIEFFTKIAKAYGSNPHLLYETFNEPLDVSWNDVLVPYHKKVISAIRAIDKKNVIILGTPKWSQDVDVAAQNPDQGFSNLMYTLHFYASSHFGDGLA

SEQ ID NO: 164301 - protein, 149 aa, Heterodera glycines
QMLEVRAVGTNIGKEQDGPSYEMLFRLTTTNRSKSAPFLAKIPTKTLKREVAIEAKTNNSTNDDERKEEEQFASLKNRCHTIASTSAPFASTKVQQNGVDSNHSPSAKQSSSSSPVASTKTFRRRTAFETSEAMREIFGAYSPFSSQKK

SEQ ID NO: 164302 - protein, 213 aa, Heterodera glycines
MRQASFYAVARGRAVGVFNTWQKCNDSINGFSGAKFKKFPTLEQANDFIGKHRETLNSGGKVISKKGPPVRTMIVKSAATTFAERRLTRNTAMFGVEASNSLAASNLVSVDDGFTTVVYTDGACSRNGFVGAKAGFGVFWSDGHPDNVSAPVNGPATNNRAEYLAVISALEKATARNIRRLVIRTDSALLIQSMTKWLPKWRTNGWETINGTD

SEQ ID NO: 164303 - protein, 96 aa, Heterodera glycines
SLSSGRQNVDAIIYDRIGELETRQNVFVVEREVKSALFKSPRTSPSLSRANSLFRNSQSPTMPVEEPRRSPSARRMLANGFARQMTIADTDFFPTK

SEQ ID NO: 164304 - protein, 171 aa, Heterodera glycines
GGNKSRIWQLGSMDPSGQRLDQLLGKESKSNEQKQRISSLFTSVHLFMPKPVVVLYGEELGLLSGKPTANKLANRIVYPWSNETFGNQSQGFFVFPQRTKNGDFESQKNDKHSPLALFKEIAKLREHSDFFSGVLSHSSSSDGLDFYKIKRSQGGFFVLVVNWGEKQKALD

SEQ ID NO: 164305 - protein, 222 aa, Heterodera glycines
FVKEFNRDEPKLDILINNAGIMFYPRFTKTVDGHELTWQSNFLGHFLLTELLLPKLERSEEGGRIVNVSSSVHLHADSVDPEVVESPRRFGIIATYARSKLANVMHVVALTKRIRTNDSGSKVSANACHPGSVNTELIRNNFFRKYIKKAFAPIIWFVLKTDRDGAQTPLFLALSRQINGVSGKYYSDCKEAKVHQFAEDEIACEILYNNSLEQCGLDHSAI

SEQ ID NO: 164306 - protein, 122 aa, Heterodera glycines
  unsure (1)..(122): unsure at all Xaa locations
MSAWICPGFLLFFVLILITDHCPMTQAVTQPPYGQLAVSGKNLVQKSTXKAVALHGLSMYCSQCPPNFWVKQTVNKLKCSXCNDNDVRAAMASSFGGYISNPTAEYKKMTAIIDGAIDQGLY

SEQ ID NO: 164307 - protein, 150 aa, Heterodera glycines
MFGTLRFIATLFAVTALFLDDALAFGPRAFLKRQAPPSAEMAPPKAAMDQQVAMELQQQQKHFERFVMEPQRVVPFVPSPATAYYGGGVGGVSYSGAAFAPQQLQQKRFDYVPTDPYSYESFYPLVPAKRFDAGGFGAAYGSRGRFSGFL

SEQ ID NO: 164308 - protein, 100 aa, Heterodera glycines
SFSTFSLFIVKMCQNYFCCVFTLFFFLCVLFSLVDSRPQLLNSVSTSGLLIGKGSEVKSASVPLLSEPMIEIHSHSAPVSPSELNFSRRRRKRISNNKSN

SEQ ID NO: 164309 - protein, 113 aa, Heterodera glycines
  unsure (1)..(113): unsure at all Xaa locations
VRPGNGWKPHPRLHIFGKLEVNGANQHPLYEFLKDSCPQTVIQIGKREEXLCTXPIRTNDITWNFEKFLIDSEGRPRFRFHPTAWSHGEVVQKFSEQMAAEQVKEVQGEVKKS

SEQ ID NO: 164310 - protein, 170 aa, Heterodera glycines
LPFDNFFFLTMVQMWCMETYPCGDPRLPHHCFPPKLVNPDELTKRTGALYYKLDLEDQVALSKRIAIMKLERNFTKEDTYTLDAQTTNDFKEKIAELFEETESDEDQARMVLEGSAYYDVEAKDGVWIRIFCEYGDLLIIPKGIAHRMTTTPKNYVKVRRFFKSSDSDED

SEQ ID NO: 164311 - protein, 53 aa, Heterodera glycines
KSWPCADKLHKTDWKMQRQKCANHMTSPNIGLTDNSILFHFVISFKCFQILLL

SEQ ID NO: 164312 - protein, 140 aa, Heterodera glycines
HFVRLPKAPPIIHKPSTNNNNMEIPSSNYPPPPPYDSSVLIQQPNNPSPNSPMMEKGPLPQQQAYAQPQVQHQQAERRMVRDLVTMFFCFVIPPIAIALQNGPSMKLHILLSVLLCILGWVPAVLHAVWYCFFAMRHYNH

SEQ ID NO: 164313 - protein, 66 aa, Heterodera glycines
MATSAKIFVLLFVLLTVALLVEQATAQWGYYYPYYGKREAGFAPQGNANGNAEGPAAGGGHAMFRF

SEQ ID NO: 164314 - protein, 149 aa, Heterodera glycines
SLCNKSQVGNLNECLLLAIKHNAKSDQCVFLLIIPKSNQTSSAASSPSPSSPSFHLPLPSVRLCLVRFLFTHTIFPGPKPIGTVGKLHPLGIWRAVECPPSPDILDIFENFSSNLAPLSPAHRPKSGPIAADNRRGDGWKLTNLRCGTP

SEQ ID NO: 164315 - protein, 251 aa, Heterodera glycines
MHSFLVLTILFANLATNAFGQQWPKATSEETVKATIKVSGGVKDFGFKRLTASSALGTGDQSEGQKALIRAEKNAVIKNLIIGQNGADGIHCYDGCTLQNVWWEKVGEDAATFRSSSGCKEYSFTVTGGGVKNAKDKVFQMNGGGTLTIKNFVAEGIGKLARACGNCKTQCQKRKFVLENIKVTGLKTLLCGLNENYGDVATIKNVQITGSKKVCAEFQGNDQQKEPPMLRSFDIGSKGDGKNCIISGTTS

SEQ ID NO: 164316 - protein, 94 aa, Heterodera glycines
LIFVGILPFFFGCLFLFSPTATATASTTSIVTTASANNDEVRLNSSNIGTESDLAVFAFLAIGQPQIVEAEHGTDQQQNGEKTKRGHFVNLIIW

SEQ ID NO: 164317 - protein, 79 aa, Heterodera glycines
MRFSFPLLAISFLMLLLVAPIQIHGMFGSNGRGRQMSGGRGQMGSNGMGPGMGGGGGSIRRMQQGQGMGGNGGGGGGMF

SEQ ID NO: 164318 - protein, 89 aa, Heterodera glycines
MNAFSLFVPFSNAHSVRLSFYSFSVSITTAAAHWSHRPHLTHLRHFSLKQFFCVRSAEKDKRKGQNEQNNEKKMKQMGRHCQINWNNRN

SEQ ID NO: 164319 - protein, 176 aa, Heterodera glycines
YCFEMIKFVLVCFSLYIFVALTFGHPSLGSRGSVQQQNGNGNSAQQQQAQFGQMSVSDNGTASPPPAGNGSYRAKRSPCCDFGSYPFMEPPSRYGGFRYPFMGPPPRRGGFRRGGRRRGPTGSTASPSSTNSAALADQFIVNNETETTPTPTEGTESSRSTDGTTATNTDGTTAAN

SEQ ID NO: 164320 - protein, 242 aa, Heterodera glycines
  unsure (1)..(242): unsure at all Xaa locations
MPQNEHIELHRKRHGRKLDHEERTRKKLARAVHDRSKVAKKLRKGKAKLYHKKRYAEKVQMRKLIKQHEEKKQKGTTDTQTEGAVPAYLLDRQKETAGKALSTAIKQKRKEKAAKYQVPLPKVRAVSDAEAFKVVNTGKTRRKGWKRMVTKVTFVGETFTRKPAKFERFIRPMGLRFXKAHVTHPELKTTLCLPLVGVKKNSSSQLYTLPRVITXGTIIRMNVVEXGMVTQGRQVVGQDTAQ

SEQ ID NO: 164321 - protein, 159 aa, Heterodera glycines
  unsure (1)..(159): unsure at all Xaa locations
MNPNGFFFVLAVLFLVKVDFLHGVYNEPMARQVLQKHASQFQQHCKNARRGSAVAKCCSAIRSIMGRFTSQKKAMNQMLAKCKAGTTPSEAQQMRRKLEGSNKLKDCGQFKSQIQHKFSELKQYCNNGAENEEENDEXSEREREEERVXEREEQQNSNH

SEQ ID NO: 164322 - protein, 138 aa, Heterodera glycines
MSHNQRGNANANMGPPQGVGSGSSAENSDSSADNQPSNEQWEAAFNSIGDFSHFVRQVFHSVVHGMAVNDSSIFPPNSAQARNGFTANSRVTGFTPSIVNPPLSHESDELFMNIGAVQGLIAMPMPPRENAPQNQHHP

SEQ ID NO: 164323 - protein, 182 aa, Heterodera glycines
LWQLIQVEAVELDKFLDLLQRLNYAQHPEATAAILVIIRNMEPDPDPAVMRSLLRNLFLRQPDRDLFTVDALKLIVDYSDNIPPMSDCISKMVKHAIHNDEIIAPFGQTKLGKARPRVPVVENILDHLDRFRRHCIDRESKGVENLLNNALTLELFRSLKSHPKLADIRSRFTELFALFDIL

SEQ ID NO: 164324 - protein, 220 aa, Heterodera glycines
ITKKQLEEKAQRLEREMSEFVEVAERAGSRGDLDKSQKYVKRAEEVNAELENVRKLLDPEARQREVYQAGYKDPNAPKPMRVCEVCGSFLIIGDVQQRIDDHMQGRQHLGYAKITATLAELKLKLRDEVTPERTVSSRSPMSATSGGGQRRQRRSRSKSHERKANRKRSRSNNSRAEGGGRRRMKRSHSRHRDDANNNEKHSAHGDASDDHRRRRVRNSA

SEQ ID NO: 164325 - protein, 200 aa, Heterodera glycines
  unsure (1)..(200): unsure at all Xaa locations
GPMFSGKTTELFRLAQRYILAGRKVAVVKYALDTRYDESHACTHDKRKMEAISATKMEDAFEEIWHFHLCXFKDIVKYAQELANNGKTVIIAALNGDYRQEPFQNVAMLIPLAEKIEKLSAVCRCGQSASFTFRMSEXHELEMIGGQELYRALCRTCVVEYNHVKQQLLNGLKKNGNVSLAKKRKASDATAHPTLRIDTV

SEQ ID NO: 164326 - protein, 33 aa, Heterodera glycines
GPMEPIGTDRKEMPTSGRDQLHFNTLIILLITL

SEQ ID NO: 164327 - protein, 137 aa, Heterodera glycines
ERSMKALIGTVDELNKAVNAYGKYTVEKQKYDTMYNNLMQKRQTENEARQSRGEPPLTMEDIKRQLKQPQMQTKYGMLDLLLNALDTDAFTTYQIQTTNENVAKLHLSQAVSAQPVVAASSAAIGTSAANAPNLERK

SEQ ID NO: 164328 - protein, 208 aa, Heterodera glycines
IYRYLPPNAQVVLLSATLPHDVLEMTSKFMTDPIRVLVKRDELTLEGIKQFFVAVEREEWKFDTLCDLYDTLTITQAVIFCNTRRKVDWLADKMREANFTVSSMHSDMEQKDRDAIMKSFRAGESRVLISTDVWARGLDVPQVSLVINYDLPNNRELYIHRIGRSGRYGRKGVAINFVKNDDIRILRDIEQYYSTQIDEMPMNVSELI

SEQ ID NO: 164329 - protein, 134 aa, Heterodera glycines
  unsure (1)..(134): unsure at all Xaa locations
PAVASTNAIIAGSCALEALKLASKYLFXVVALERDPECLVCGQKSVQMYSVREDCTLSGFLDDLKDKYQLQNPSIRAGSTFLYEINTLMPEMETASRKNLCKTLKELHVTEDSELLVADEALTRSIVFRIKYSK

SEQ ID NO: 164330 - protein, 172 aa, Heterodera glycines
FLILPFIKHSPLNVFLHRMNGLFEVAISDYYLFVFARLILTFIRLAFSAHLRPTGIRSFIISTFISFIAGVLFRNRCGPFAPSVNGVDLVRFFGVGENQFCAPNNSRGNECPFLPGKVRHFGKCRRLLCRTRETSGWPLSAKLGKKLGRKTEKSPTEMKMNSLRWKGFEFQW

SEQ ID NO: 164331 - protein, 110 aa, Heterodera glycines
YAMLENEIGVKMDELQGLIMALSYSHQIVNMAVSMPEPVYQADELAKRGKNNFAALKRFKPNQVPKKEHRLLAKKGAKRQTISLVDHHELNRILSYWGDGTFVLSNRFTA

SEQ ID NO: 164332 - protein, 129 aa, Heterodera glycines
GHKRYTGEVMNGMGMDRHLLGIRLLAAEHGVPLPELLGSDIYQRLLHFRLSTSQLPTSHVWPMGFGPSAPDCYGVCYNPQENHIFFIITAFNDCAETSAERFANALERALLDMRDLVDWAGRLKGRAKL

SEQ ID NO: 164333 - protein, 41 aa, Heterodera glycines
KDENGMSQTHPTLIDSQFDLNDLFIFYCFVVVKKKKKKTRD

SEQ ID NO: 164334 - protein, 24 aa, Heterodera glycines
FFLSTAVRQRSSKIYSMPQILWAG

SEQ ID NO: 164335 - protein, 71 aa, Heterodera glycines
  unsure (1)..(71): unsure at all Xaa locations
TTSEXXKNLKLDALFKVLAPPDEEFEEWLRDLKLLHTTRFCDCGNEMRYKWIKEDRIFFIICGPKSRNCTQ

SEQ ID NO: 164336 - protein, 146 aa, Heterodera glycines
MTEFLYIRMKANDCPLVALIRFGGCATSFTSESFARKANLLGNIDRSNCETIYVPIFGGAKVLGWANDVQIRIDELDYQFVYRLGVMEDKHLPMYCKKKFDMLIATDCCFKIGFTIDCGKKVVSRKGKVVKILTEEQIQSEMEDTY

SEQ ID NO: 164337 - protein, 274 aa, Heterodera glycines
  unsure (1)..(274): unsure at all Xaa locations
MMSNATKNILGTPTIVDNVSFDPKVSANFLHKAIEEKRKDEIIHLLCTISNQQRQELAREFKQLFGEDLSPKLKKALSGDFEELILALLEPPAVYDAQQMHRAMSGLGTRESVLIEILATHSNRQIDEMKRVYEQLYGHPLEKDIFWDTSGAFQRLLTSLCNDSRDESWSSDPIXANMTAHDLFXESEEESGVNDFLFYQVLANENFIQLHLIFNEYHKVSCHPIXHAIQQQFDGYTKDGYLAAVECVLNRHSFFTKVLQNSTQSFLGIGRRDS

SEQ ID NO: 164338 - protein, 135 aa, Heterodera glycines
VAPPQPVLHTENVSSFLDLQTEFIKRRDAAIAGKSQSFATEPTHRRTPRNNILAISKEEKKAKSEVSTLRVFLIRQNEEAIRKEEQQRAKQQQILQQKAAIYERMAKGERLVYDDGKEAEFLVDFHTKKKELEEE

SEQ ID NO: 164339 - protein, 48 aa, Heterodera glycines
LFVSYFSVFEFWCAVQQKSVRRFTKKCCSNETFARLSFPLRRFFGRWQ

SEQ ID NO: 164340 - protein, 54 aa, Heterodera glycines
GSIVTVHANYHCYFRIIIILIILSIIIVINYYYSFFASIPLILPSLFVTHQLIN

SEQ ID NO: 164341 - protein, 30 aa, Heterodera glycines
FPERTRSLKQQRHFGNGWPEKGSSKPQIKK

SEQ ID NO: 164342 - protein, 48 aa, Heterodera glycines; identical to SEQ ID NO: 137441

SEQ ID NO: 164343 - protein, 253 aa, Heterodera glycines
MAHMTKKASNFLIGDFNSVDFDNMADQLGNHGYVSPCNMLTALVYIMRLKESNERDFLAFNPTELFVSSLVLATKYLNDGTLQEFVWNDEWASVSGLALPKLNELEIRLLTSLRWDVSIQSEDFEKVLARLEGFVASEMAQQNGVMSYNELCILSNTHGFNRSILCLLTVLLKFLFVLLAFHLALLAGLSVLNMAVSRKQELAASDACIYHHGWDDCSHPPILLANERKIDANLTKVVHKDDFFAFVHAFSIS

SEQ ID NO: 164344 - protein, 169 aa, Heterodera glycines
  unsure (1)..(169): unsure at all Xaa locations
KAPISAPEIILGLPFREAIDMWTLGFVIAELFLGWPFYPGSYEYDXIRFIVQTQGLPPQQMLAEAAKTHRFFKMIKDMASYWRLKSIEYELEMSTKSKETRRYVFNCLDDIGQVHLPSDLDDIDRMCERNDRLEFVDILKQMLSMDXDRRLTPTRKLQHKFVKMTHMIE

SEQ ID NO: 164345 - protein, 132 aa, Heterodera glycines
QQPICSVSLNCECQVHPKKPRNNLCRRKTMRFRPNLAISIFYSLRIGFCETLNFSNPIPARSVPDHNLSFSFIKNLFYMLHRRHPSRPNCHHRSNDALPLDDLVPESFEHGLHRSLPSKTLSIQNGSEERQR

SEQ ID NO: 164346 - protein, 146 aa, Heterodera glycines
VTEMGSVGVIFVKNVAMVLMLLFGRTMMAPFAIAGIVSDNVEVGYYPSREKGKGIYEWIQVIKPLVQGRVMLTLTIANSVLFIATCILLIYLLVFAVLLSTSNHQLEELRGKINTVDYCSVLHPLSAALQNARESATTRRCDWQMS

SEQ ID NO: 164347 - protein, 179 aa, Heterodera glycines
ATFAVDVEEIAAGHHVTPVDMTTATSKLQLEAAEVRNPANKPNWSSYLRSQLVPQNEYNFIIELEKAKNKQERDEALAKDKTNSARSIINLITEVAKDQLIRYVLTLFDDLLQEDKSRVEIFHDYARRQKRTIWSWFQGILTRNDSFIVNQMSAIFSKLPCYGSVLMDGQELQAYFNFL

SEQ ID NO: 164348 - protein, 132 aa, Heterodera glycines
TLSELFAVSQLLSVRNAFVGLRLCQIRGADQMAGEESVRHHPIRGRAAHAALSILESVDGTIRVQLHTERMRRTKAEDMSGLIDHLPINHSRIRIIIQYRKPTKHPVEDKTAKTIAIINPVEAKNWNLAACC

SEQ ID NO: 164349 - protein, 113 aa, Heterodera glycines
FFFFFFIFFFFFFLTINFITIASIIIYHCHYHLSPLISALVLTFFFFLYASSVTSSCCCCCCFGACGWSHAYGSSGFGALFTLCVSVSERFASTQRLVAMVNSVLQFLVAAVT

SEQ ID NO: 164350 - protein, 88 aa, Heterodera glycines
IKCIFALKFFLYISNLLPRHCWIMADTEANNRQNELEMSVNRWLGETLRIECTMCRTLSWWILANFGNSKKTRRVVIVLGFRSDGRER

SEQ ID NO: 164351 - protein, 110 aa, Heterodera glycines
QQLIRTFFASQIATIVGNFIFSPFFRFSVHMEKEVSAEGTAPQILIAQFAVAARWAVETPQIVHERMFSVHFIVIVERGDGKDWTSVGQIGAEFHGSAQHMDMEKRKKQK

SEQ ID NO: 164352 - protein, 68 aa, Heterodera glycines
TGDAAISGSSAQQAKTGTESSTSKPKACCVCKETKGKRDECIILNGEENCGQLIEAHKKCMREYGFEV

SEQ ID NO: 164353 - protein, 98 aa, Heterodera glycines
MTDQQNSIDGGWTEQNVNDEKIKSLASRSVAKINSESNDRFSLFPLEVGRSNCSKNQPNLADHANCATEDDQTARKTFLATIWEKPWEQFEQITYKLE

SEQ ID NO: 164354 - protein, 115 aa, Heterodera glycines
SLSVSALHHSPPLPERNYRITSMDDVSGSPKFCYFYYYPFYRNRYPSYQYNRCRTYASPYDKHSSNWPEHHFNYPFSLSGYKPCSFYGSYTYAPYRPNKSPSGYYYGWYNGISGF

SEQ ID NO: 164355 - protein, 90 aa, Heterodera glycines
LISHINVFSFSSDAFIVIHSFSTCVKIVVDKPFSVRTALKSLDEKSVLCHCAVVVRKFISAIFDAQIAAKVNFVKSYMQFGRVCVKEFDP

SEQ ID NO: 164356 - protein, 112 aa, Heterodera glycines
MADTEANNRQNELEMSVNRWLGETLRIELTDGRVIYGQLVCTDNVPNIILVDSREFWKFKEDEAGGDRTRIPIRRTGTVLIKGEYIKRIFQIVLPEEEMNSIRRKEEETTEM

SEQ ID NO: 164357 - protein, 134 aa, Heterodera glycines
QLSVSLLSFCSMSSSRFFVLLPLLFFLLLSFECVLLAPNLFSSKIVAFGESGDAFDSPSFADGTSTERFSATESDGRAMAKRNSRMVNALSTILNKRKELGTNDAFRVRIRSLDQMGNTNCYFSPVQCYFFEER

SEQ ID NO: 164358 - protein, 113 aa, Heterodera glycines
LTNHHGLLSLSFFCVVRTFIASDVATCTKLVRIHIAPSRVQTLSSYLRVWLRMEFWHNLAICRQCLALRQPSVVVLSAIRSARQVTPCSGPGLTMAQWPHHQNLKRRGSNSRR

SEQ ID NO: 164359 - protein, 153 aa, Heterodera glycines
LLQSFTHIFLMSFPCGDGWRQQIHPEEQLPQYEQKCDIEMQLDTLKQTVKANTKACAESAQRIEDLQSFRFYYITLAFFAFFILTMSAMFLYTRISLLSDRIYTQIGNVDNRIRDHLDTKSERLYAKIDALSAQVQRLGLAMATLPNGSHTTT

SEQ ID NO: 164360 - protein, 147 aa, Heterodera glycines
MATAKKKTRKLRGHVSHGHGRVGKHRKHPGGRGNAGGQHHHRINFDKYHPGYFGKVGMRNFHVRKNHYYSPSINLDKLWTLCTERTRKQYAEVKDKAPVIDVVRAGYHKVLGKGLLPKQPLIVKAKCFSHSAEEKIRKVGGACVLVT

SEQ ID NO: 164361 - protein, 38 aa, Heterodera glycines
TDEKYMARKNSQIVQAGSRRRSAERPVTSLHEASHVIA

SEQ ID NO: 164362 - protein, 149 aa, Heterodera glycines
MFCRCFPHSFLLLLPVLLALLSLFKCISASNHQPQAENVLLEELIQEIRKLNDRMEPALGREGNAEEEQMLEIKRSQGMVPSELWNRAGDKRAQLPFSGGIYGKRSPLPFSGGIYGKRSARNLHSSSLIIPTLNRQARAMPVNDGMYGK

SEQ ID NO: 164363 - protein, 143 aa, Heterodera glycines
SATGPGILGKTRTFSGSKIKMKQQQQHSPPENSSDSDSPPDPFKINQGSLTLAQLVEFLEVEHAETVELMQAVWRRRRLYKMPVRPPNPNNQNDDRFFGYGDHLAEDVFYNLVEKTRNSIHGIIQLKVLHVGAWKSVDVEYHF

SEQ ID NO: 164364 - protein, 91 aa, Heterodera glycines
NASFLLLVNILLCSIVLLHLLSNENGLVNAMPALNGGDELLLRKKRQDEGDEAEENAGGENAENGNEENNGEGQNEENNNGEEKKKKKTRD

SEQ ID NO: 164365 - protein, 100 aa, Heterodera glycines
KGQNGGAAELLAVLFVARLFPRRFLRPLQIGLNVPMVFTFGRPSEQPKPKGTLLLLQSVHKTARAQLLPLLYQPLKKREKQRKGKAKERRNAKNSDDCAA

SEQ ID NO: 164366 - protein, 77 aa, Heterodera glycines
NCSIFFSFQQMQLCCPYFSQQAKRPAQFVAPAANKHSSNPSARFATIFANSCSCIGVPTTSAKPKKAKRIKNDKISN

SEQ ID NO: 164367 - protein, 92 aa, Heterodera glycines
FLMTNSMPKILFTIIAFVNISQILFATAMYKGKEICGKTVEECQAALIAFMKDSGSNQNYHASENGPIQLANDKWCIWVQSYVTSGAPRSKW

SEQ ID NO: 164368 - protein, 126 aa, Heterodera glycines
MEMRCVPSRRPFRLIAPLFNAIPTFYLILTLIFCILSPWADSADADEWYGARQLRAPKPKFIRFGRSGQKMIPFSRSFSTETQYGDEGINQLDALVDAVDKLYQSSPEIRAFKTAPKRAQKFIRFG

SEQ ID NO: 164369 - protein, 120 aa, Heterodera glycines
MNTTSLIRLLFAVFCVFLANFPQSAQAETKKVYFVYGTQVTVTAVHNGRGINLGATTGEGVESKQYLEIDTNVWNGMNDNDQIVFHVRTPHSVTSYDKTTVGKLRNTSELDFADQTIRAV

SEQ ID NO: 164370 - protein, 103 aa, Heterodera glycines
MQVSQMRTMSLSVASLVALLVLLAISSHPTFASPISSRDLNDAAEAGPLQAVEKRRNAEFINGLLTMERLNAMGKRSPVPASSDDGVVPMTLWRSQHPFFWTE

SEQ ID NO: 164371 - protein, 124 aa, Heterodera glycines
MSSNGIITIVALFLVLFGTHITTQIGAMNRHRQQRSLGHPFTVDKQQHTAQNENLVGAYLSRGMFSCGAKYVGTLQRLKRIIEEVHADYSECQKSMKQMDENEQMAFGKGHGTERFAMIDELIN

SEQ ID NO: 164372 - protein, 113 aa, Heterodera glycines
MKFVLSDKIRSQRIRGFLVDINGVLFDTSLDGGKAIPGSIEAVKRLYELSCVRFVSNESSGTRGAICQKLHRLGFVGPQPEHIFTPAPVAVKYLRQHGLRPKLIVHKGLKVGL

SEQ ID NO: 164373 - protein, 176 aa, Heterodera glycines
MAKSSGKQSKASNSKSKPKPNQSKSNKPPSSPSSSSSSCMGCLSNTKTAGPIDSYLGKPVKNSIFTFYGAGGRGACGLNAGVPKMSAAGSGQLFKSDGQWKDACRADKQYMLDDPICKNICIKVDYNGKTLTVPINNKCPECPPNHVDLSIDAFNSLEPRRGLVGIANGATLTYMR

SEQ ID NO: 164374 - protein, 128 aa, Heterodera glycines
GWRTHQEDAHNCILSFGDECSFFAVYDGHGGSDVSSYLKKNFPDFLKEHNLLLHTTDEGLSAALHKLFVKFDETLRHDDTVKAMVELKTALSTTSDQQQQAEEQKANEGCDPGEKERKERESLIDAKK

SEQ ID NO: 164375 - protein, 83 aa, Heterodera glycines
TWKVIRSLPFIPVHFSVSISKYCFQFNTFSRGFSKINFASVIYSFNCDPSTINEIHFLFCCLRTLGKIGQKNAENREQKTNKG

SEQ ID NO: 164376 - protein, 106 aa, Heterodera glycines; identical to SEQ ID NO: 138111

SEQ ID NO: 164377 - protein, 110 aa, Heterodera glycines
RFFAPTTLLILAILCLDEVPPFNSKKMVAKMTRKTHLERILALIMTGEGALFLRYKIWKIGPKCRLTNSQKLKIFVENHQIILFHWFICSRYRASNSLSKFLRVLNFRVF

SEQ ID NO: 164378 - protein, 230 aa, Heterodera glycines
MAQIHFKIFLIFSLITFSQCRINSEPSEKEGPSSIGGIQNATSDHRSAAAAASDYHASSCDGFGWTLNKGKCYKVIEGLMDWNHMIAACKSEGAILVCIQSEDENHFVGKMIAKPIERSLGNYRLETTLFNTFWIGLNRVKNGEKYDSTWVNGKKAMFGNLPEITTELSTANGKNKYPWGEGEPSGTNKFTDPTGVKEECVHMFSADGSWNDAECRVQMSGGVCQKMPKY

SEQ ID NO: 164379 - protein, 199 aa, Heterodera glycines
IIRKLVADGDGTGDDRRIVQLFQLIIMLSKSNADTKSITNKILINLDQIELSFQKQAQISAITEIEIANYEQLCTEIDEMITQNNNKMDAVKRELAEAKQIRKNRQEYDALAKLIKEKPSRVETSKRLKLLQDELEEAYAKQKMLEQRLIEKRKNMYTLAVLLDNLEEMNKESEDVPMSEGDDASPAGAVPSSSAGSLK

SEQ ID NO: 164380 - protein, 86 aa, Heterodera glycines
MRILPPYFSDHFMLFIHQPQNTTTNRQHIFHIWITKKKPDDDFDQPHQFFNCFFLQFLNLFKQFACFFAPPSSPPPPTHLFGLYAF

SEQ ID NO: 164381 - protein, 42 aa, Heterodera glycines
LIITVKKKYFGENIFKLSSYSLKQSFFSMALSPAGLHLSKSM

SEQ ID NO: 164382 - protein, 105 aa, Heterodera glycines
KLVDKGEGYTGYQELKDGVYHGYQPLKPRKTPKFTAEFGLSSGMLNIAVARDIDSIPKGDNQDGSQYQYLSAHNVARGQYIPPTNPNLPNLDIPVQQQQQEVAEE

SEQ ID NO: 164383 - protein, 211 aa, Heterodera glycines
  unsure (1)..(211): unsure at all Xaa locations
SNEQYSAGTLWPFFFTVDGDEKRAVREAFNVIDRFISVEECSTDKFDDECAKKEGALTDGQKDVSDSLASECQQIRQNKRQFASNAVRQYMTGARCSLFFASPMIRPYNVYKIAEQMVDQSQKESLTRFLARVIPVEETCHANLDEIKTLLSEMVVKHLKGEKKDTPPTYAVEFKASNTKLLSRQXXYDXVAQLMNELSPESAVNLTQPDL

SEQ ID NO: 164384 - protein, 150 aa, Heterodera glycines
MDGRQKKLKTVDFEILTREQLCVLCQAVLNKWKGQANKNEQHFREEILDSCSLIENPSEAKKCRDGVTDAKVARLRKEGTEEMCVAEGFCGKGEMKELEKKMERMEKRIDDRKQKFEKGLRIIPPVDLSPVKSVPGDKATNTTNQTMGGG

SEQ ID NO: 164385 - protein, 68 aa, Heterodera glycines
LKNAPFFARRLCAPLSHQSVHFDGRRAKVSFVGLGEAGHTVSKRLRDINISKDQMLDVRKDVGEPVTD

SEQ ID NO: 164386 - protein, 145 aa, Heterodera glycines
MESYKAAPLYSVKFGAEKAQSLGKFIRIFVLSNANGVSGRMLQKTKEMATERERKKQLTNANDLKLDNILLDSDGHIHLADFGMCKTDSNRENGMASTFCGTPDYIAPEIIKGQLYNQAVDFWSLGVLMYEMLIGQSPFHGDGED

SEQ ID NO: 164387 - protein, 59 aa, Heterodera glycines
MAVDAQQIIELILCLILPPLAIFIHANSDCNVHVLISIVLRFLLFFPAVLHALWYCFFA

SEQ ID NO: 164388 - protein, 72 aa, Heterodera glycines
FIPKKTMHSSIFHTFDSVLIILSFSIFHQLSLDYSFFCAGHQSPRLGDGRVFIGLEFLLRFWFFRDCRISGP

SEQ ID NO: 164389 - protein, 277 aa, Heterodera glycines
RWKIHTILHFVPHQYAWVVERAGKFHRILEPGVHIVYPLIDEIRYRHCLKEMCIEIPQQEAITKDNVQLDLDAILYVQVVDPYKASYGVQEPEYAISQLAQTVMRAEVGKLMLDNVFHERANLNRAIVGGIKESCAPWGLICLRYEIRTMNMPPEIQRAMKMQVEAERKKRAAILESEGICEAEKNRAEGEKQARILRSEAQMQEQMNKSMGLAKAAEAEKIQRILQSEAEMQMKVNMAIGLAKSAESEKESRVILAEAEEQEQVIVSRGLACAIET

SEQ ID NO: 164390 - protein, 27 aa, Heterodera glycines
ERTSLEFFFFFFLILALIPFLWWARQQ

SEQ ID NO: 164391 - protein, 54 aa, Heterodera glycines
MSLWRSIGLTYTRYSQVAAASLRECVKKGTSGEAKTAEPIKITSWEGGKAKKPE

SEQ ID NO: 164392 - protein, 110 aa, Heterodera glycines
GSKKSSNKESKKSANISPDSSEDDLEKDELLEKNADKRERDHQGNEIVPIGGNRFISMDRFKGRILIGIREYYQKDGKWLPGKKGISLNHDQFNGLLKILPDVKKMISSA

SEQ ID NO: 164393 - protein, 121 aa, Heterodera glycines
TFLTNQNRSHPWFNLIKMNGEVRRPNKIVRYKPIDPMVQPVTAEDSIPEYMNVLGMVFSMMGLMMRLKWCSWVALICSCVSFANMRASDDTKQVVSSFMLSISAVVMSYLHNPTPIVPPWA

SEQ ID NO: 164394 - protein, 156 aa, Heterodera glycines
SFSLTRLFPTLVFHRHGNIQLLQIAAYHEKVIDHYENPRNVGSLDKNDPSVGTGIVGAPACRDVMKLQIMVDGNGQIIDAKFKTFGCGSAIASSSLATEWIKGQNLEYARKIKNQQIAKELSLPPVKLHCSMLAQDAIQAALSDYQKKQEARNEKT

SEQ ID NO: 164395 - protein, 79 aa, Heterodera glycines
KSKRKAPTKAKSIVALETQFNCPFCNHENVCEVKMDRERNVGFIQCRVCMEDFQSNITALSEPIDVYSDWIDACEAANQ

SEQ ID NO: 164396 - protein, 90 aa, Heterodera glycines
FFFLRQQFLSANKCNINGITSQQILHSENVKISSWSVEVFRFLCLLLLLLFSSYSGATVKRNFICGLFTWYTPFSETASAGLPFTVASYL

SEQ ID NO: 164397 - protein, 92 aa, Heterodera glycines
MFGRQFHIVMADNSVAVLKYKRVPNRRILDFYHTEVPPDFRGQGFAEQLVRAGFRHCLDTRFSVYPSCTYVQKYIRDLATEEEKKIVVEKYH

SEQ ID NO: 164398 - protein, 252 aa, Heterodera glycines
MPSSSGSEKGNGRNGVRGEEEVKGGKEIASKTLNIQSKRFYLDVKQNDRGRFVKLAEVAMNGRKNRLFMSMRICKNIKELLGKFEGHVPASEEVNGKAENVTIQSESIVTERRRYYIDLRENRRGSFLRITQLETHSGIRNSVALPFEGIGQLHDALDSILEEYGEGFIEEEAELPHSQMIRTDGKSFFFDPGHNSRGDFLKITELKSFMGVRNSGVLSIRAIPQFTQVLSKLYDDFQELRAVEEVNVNNVL

SEQ ID NO: 164399 - protein, 201 aa, Heterodera glycines
MPPPSIHGQPKIRHDEQSNSVFLEVSVQGADAPKTKWYLEEKEIASGTGAYRMSTAEQEGGRKLLICEIKNYDKALQGNYKAVFISADGKENYATFTVKSGSAPEFYEKPKIVQKDNGKIIQIKVRVKSHIEMTSEWFKDDKPLKGSDRLKISSQKDEKDPQGMVLLLDIHEPQKEDQAKYKCVVKNAEGRNEQSLNLQFE

SEQ ID NO: 164400 - protein, 107 aa, Heterodera glycines
SQKSADKQLTRRKRNNNNNKQMGSISIHHSFVRLQFSWLHHFDLWGPTCYIALHPNTPLIINLSWTVFARVIVLVISASVHKSNQCRLTIFLGFTANIFAIIHSSSE

SEQ ID NO: 164401 - protein, 177 aa, Heterodera glycines
NESLKNVCCTFRRCSPSPLRFGISSQRRRCFCLLRATLLFAEQRIRRHFWKKNRCAIIANGCQRMGGTAKNGNGKRGRGRDGGGTAAGGSRSDGGEWGGKSEGRADGEGKSNESTNDSPPYTSPFIRRLWKWPNGATIQTNEAVLLLSNPMSDEAIFGLTRPNNAKQRDHSQNTQFL

SEQ ID NO: 164402 - protein, 179 aa, Heterodera glycines
MGQALSEPITTKNSASCSNDRYFVGSSSMQGWRISMEDAHTHLLELPEDPSTAFFAVFDGHGGAQIAKYASENLHTQIAQSNTFREGRISDALVEAFLELDEQMMASEQIREEMSGSTAVAVLIKDNFIYCANAGDSRAVASVDGRAIPLSIDHKPNNEEESRKIFAAGGYVEFGCDNG

SEQ ID NO: 164403 - protein, 85 aa, Heterodera glycines
LLSFRRKMSFYTVHRDQLPLRALFNQHGLSFQQRWHSPHYKYSEVLGGTYHIPHSRYPPHDVYKTPWLCHLHPTHLTPGEPDWWY

SEQ ID NO: 164404 - protein, 111 aa, Heterodera glycines
KLSPVNIDSKGVFKYILIKASDGATERFLVRGYGRCKFHADILEEVQASEGEKAIEFSCVGGGRIKHEPEAKRIFVYGYSQGFGRADHAKSVEILRERYPNYTIEWSNEGY

SEQ ID NO: 164405 - protein, 105 aa, Heterodera glycines
AHLSLTYFMKRVKTFIRHKSKLHQNLVILLAQFDGWFWADFAFLPLAMCPLFVEAGPGIGQSSPGPTKSIERLREKRANRFILRNNAEQPTSKKRGDKRKAFKAK

SEQ ID NO: 164406 - protein, 77 aa, Heterodera glycines
RKKFFAFTIFLFIVLQLTDAKMSKNDYENTCGNTCGRFAKKGDCAGKSPINTCVTEGDCYCKWEGCRADYEEYVSNP

SEQ ID NO: 164407 - protein, 233 aa, Heterodera glycines
ILAGEEKRITWVPLESNPEAFNKYIEKMGVKGVECHELFGFEPDLVSFVPGPHLALIFCYPYQDKANDYQKGIYGQLTASDKGGVPEWAFFMKQKIHNACGTFALFHALTNNTDRIDIGNGVFYDWFKAAKQLNVEQRSDLLANDSELAHLHEHCALRESETDVPRNVAHHFISYFTHGGRLFEFDSGQEFPRDCGPSSEETLLTDAGKICKELMGQLEDISCNAIALCAKNN

SEQ ID NO: 164408 - protein, 128 aa, Heterodera glycines
LAMDVLKISWSKRNPANCIPSHFPWILMGRHWSPNSSRLRMALMGSKQHCSEDICFWAKRSERRRVLRFMQSKRVNIHNQKKGEMSTYNVVDSVPSMDVWEYDEPPESRKKCLQNALVALQVANDLAS

SEQ ID NO: 164409 - protein, 149 aa, Heterodera glycines
  unsure (1)..(149): unsure at all Xaa locations
NFASKRDQCGMRNYIEHSLTKIXTENPYCAHYVVPGRNATPVLRAEYSNGRLVHVNAKAFSTERXCLHMNNLRTRSGIPIYKFENSHFSHNKSVQGMWTPSKWRDTRQNLHILPKPEFSPLLTSATSATKFLWENSVPPTAEEVKDETK

SEQ ID NO: 164410 - protein, 212 aa, Heterodera glycines
MNAFRLIADLSHLFAILILLWKIWKTRSCAGLSGKSQVLFALVFTCRYLDILHFISIYNTLMKVLFIGSLFATCYFMFVKFRATYNKDEDTFRVELLVLPCIVLALFVNADFTALEVLWTFSIYLEAVAILPQLFMLQKRGEAETITAHYLFLLDIYRALYIFNWVYRYYTEAFYDPIVIVSGIDQTVLYADLFYLYVTRVVKDGAKLELPI

SEQ ID NO: 164411 - protein, 226 aa, Heterodera glycines
  unsure (1)..(226): unsure at all Xaa locations
MPLEDYWSKERSGKRVLSIQSHVVXALSGNKCAVFPLQLHGFEVDAINSVQFSNHTQYPNVKGQRLNERDLAELFDGIRNADLPAKYSHILTGYCGDASFLRQIASIVRECRQHNPKLTYVCDPVMGDNGKYYNGIPRELCSIYRDELLPLSDVITPNAFELXDIAIANERDCLRAMEHFHRVKRIRIVVVTSGVPDETTKNKSMMHCYASEAIPSAVDTIRVRYF

SEQ ID NO: 164412 - protein, 74 aa, Heterodera glycines; identical to SEQ ID NO: 127829

SEQ ID NO: 164413 - protein, 38 aa, Heterodera glycines
RERERELVSSFFFFFLTINKSLLFMNYSNLHILLLQIW

SEQ ID NO: 164414 - protein, 128 aa, Heterodera glycines
RGVGENEFQVDSILARRVLRDGRVEYLLKWKGCSDSENSWEPEQNLNCADLMAKFNTQNQKVEPMDVEGAPSQDEVEEILGAARMNSEIFYLVKLKGDSLAQFFSSRIASEKFPKLVIDFYEQRADMQ

SEQ ID NO: 164415 - protein, 81 aa, Heterodera glycines
MVVDISKMEPFSPPVSHALFPHLTTVLLSIGLIFTAWFFVHGVTSTKKTRNLVKELFIGTLAYLFLGFGTLFLMLWVGIYV

SEQ ID NO: 164416 - protein, 177 aa, Heterodera glycines
MYNNVGLPTARGSGTNAYIQANLSNLGFSRNKLQYNAEEDIAKAEAEVNKTPNIELLDHEYKRLIEIKCVEFEDLMEGKGFSESEITSKVNEYRKLLFTEFENGRLDMDTELDLRNTHSRAKVAKDNRDKWRSALRIDAAFVDGSSLEKLKKASESVVEMAKNVDKKALEQEMEKSL

SEQ ID NO: 164417 - protein, 103 aa, Heterodera glycines
GTPNLNTVFMLIVLATSLLLLMPSSSNAKVMPQLGFANAEQLMNDNSSPMGAGVEGEVMDKVEARLLGALELLQSYKEVPIVPKFTEKRKNKFEFIRFGKRRR

SEQ ID NO: 164418 - protein, 188 aa, Heterodera glycines
MVVAKNICRTKRPFSDLNLLLFLSFVLCSEFIPATNANENGRSAPWGRRGAFKVIAFRPRRALDILESDGFGGFRKRALDVMDGDGFGSFQKRALDSLEGDDFMGLKKKKALTTADGDGFTDLGKRALDVLDGDDFVGFKKRSEMQKKLALLDQIQHRQMRARRALDALEGNAFGFRRLAKSLRKKGF

SEQ ID NO: 164419 - protein, 120 aa, Heterodera glycines
FIHTDHTQYINNFFVIFFLLFEIIKMNKNKTEIGIFLFPIIIGAQSSAFLLSYLLARLRPPLHLQPHSLFVRLQSELLFAFPPPPCPIRCWHNVLVKVFHCASEQHKGGLLVTNFHKDCG

SEQ ID NO: 164420 - protein, 105 aa, Heterodera glycines
VISSVLLLLRLSHLLAQRFELCLLFPGRQMGTDQRAVPARAVSVVKGQFHGTIAHLQTRAAVSAFEAAQVDRLFLHHQFLPQWHSLVANGTIFHFIILRRPKMHC

SEQ ID NO: 164421 - protein, 118 aa, Heterodera glycines
MTEASPLIQQKDDSIPMPLVFDRPWQPPISLVPNPPPAYFVIPANVPLERPIYDQNDSAIEDELAEEAKAKRAQTFVRFGKRAQTFVRFGKRAQTFVRFGRDAQRQQEMANEQAQKKE

SEQ ID NO: 164422 - protein, 155 aa, Heterodera glycines
MNVFRLSADLAHLVAIFILLWKIWKTRSVAGISGRSQVIFLLVFICRYLDLFTNFVSIYNSVMKVFFIGSSIATVFFIYFKFKATYDRNHDTLRIEFLVLPCLCLALLINHEFSLFEILWTFSIYLESVAIMPQLFMLSKTGSAETITAHYYSAL

SEQ ID NO: 164423 - protein, 179 aa, Heterodera glycines
HIFQYTFEHEKAAIFRWEKERRSERVEEETEQTQQMRKQRQRHMEEKGTKKDGERERAEEGQRRTERRRDNTLNNPEYRNGECFKIESHSLPSSNVSKPNQPPHFASSSLLKPVPMSKSSSNSLHVGIASTQNGNMLQKSTNNNTLNGLEEFEPRRDLFDLLELRSLDARKELEKFFDL

SEQ ID NO: 164424 - protein, 71 aa, Heterodera glycines; identical to SEQ ID NO: 125602

SEQ ID NO: 164425 - protein, 158 aa, Heterodera glycines
FFFFFFSHQIYQFDIKMVMFGYIVSLKNVQMPFIHFVSFVCLPLPFLLSLSLTLSVCLPLPFLHSLFHFFPSLFLSFPHFPIALHSFTAFFPHSAHFGAAGFLHSFLHLPLAHFTQSVAHLLFVFGHTLLHSSMIKLASLKEFNATTKIRQKRRKARE

SEQ ID NO: 164426 - protein, 60 aa, Heterodera glycines; identical to SEQ ID NO: 153246

SEQ ID NO: 164427 - protein, 197 aa, Heterodera glycines
  unsure (1)..(197): unsure at all Xaa locations
EFGIGDRFLLVLISSAIVYKIFPFSVFVALFSFIVASWIYFQYRQKQHWHNVGVPGPNTNILFGNTLKQFRTGVIEVDEEMFKKYGNSYGSFLFERREFCTKDPKMLRQMFIKEFSHFQNRYNAIPEREHAPKSLMRNILTVLRDDDWRRVRNRITPAFTTGXLKKLIPILCEGTEKLCKVLETENALKGKEVPLKE

SEQ ID NO: 164428 - protein, 137 aa, Heterodera glycines
  unsure (1)..(137): unsure at all Xaa locations
LISLIVLGILLTNLEAFRQQTVGIRGRLMCGNQPLKDANVKLWNKNTLGSDDQLAANRTDNHGNYELQGGVGQLTKMNVHFKVYHDCDDGIKPCQRXVNFGVPDHYVERSGSTKKWFEAGTMNMEFKYPDEDRSCIN

SEQ ID NO: 164429 - protein, 186 aa, Heterodera glycines
  unsure (1)..(186): unsure at all Xaa locations
MNDDIRDQPGTCSRIFPLIGIKYQYYLDRLTPYTAVRWTIAITLIVFFVWRIVAIQGFYIVTYALFIYYLNLFLAFLTPKIDPXLSIDKDDDGPVLPSSTNEEFRPFMRRLPEFKIWLSTMKSTLVAFGCTFFEMFDIPVVWPILVTYFIVLTTLTMKRQIMHMIRYXYIPMSCGRPRPQGEEETG

SEQ ID NO: 164430 - protein, 140 aa, Heterodera glycines
LIRMSTIPMPPPPTQDEKDQQKKSQWKPLEIGTTKIPDPEELPFGIVQTAFRASDRMRTTSEDSAESFDAYGPDSPNMTSSGRRMSITERLFGRPVPQERRNSLGEEQMGQEKPKSIAENKDFKELMKRQRKILGDDEWQ

SEQ ID NO: 164431 - protein, 148 aa, Heterodera glycines
MKPTFLMLISTCIIALVYASAEYDECEVCTDLFTEVMKKVDESGEKGEPAVKKMIIEHCKSVKGVDDKKEKLCFFIGAHPDSSTSVLGDIAKPLSFHKPPNKVCSQLKERDSQICALKYGKHIINKIKIIRLATSSHFCLKFNLKLHY

SEQ ID NO: 164432 - protein, 129 aa, Heterodera glycines
MVVVLSALSSGTFPPHFSLRWHSLSFLLVFILLTVRFSADFTNCHSVPSLMAFDPTKLRRLMPIREFLSDDQLAFERAIRQPAGGVKWMRFGKRTPQGKWMRFGKRKMAIEGGKWVRFGKRAEEMQGEE

SEQ ID NO: 164433 - protein, 93 aa, Heterodera glycines
NQIKVDQEESTKLWDWPLQSHDELVSIYDGRDRWEVGLDTGFFTPNEIEVNAKCNVLTILERHLVHIVAAVVQLLIPVGMEQIQIHVEKIVKK

SEQ ID NO: 164434 - protein, 70 aa, Heterodera glycines
MAKKTKYLIVRLASVISGTKQIWVRERAAAEAAAILYDPAIGKNVLFKEVEQVKGKDSFPDRVKKMYNIS

SEQ ID NO: 164435 - protein, 134 aa, Heterodera glycines
LSDQCFHLFAADLLSVDQCCCCCCCCCCWYCWYCWYFFFSNSYFSPDPMCMCALQSHIGMRWPAMNCMYINPSSREQLPGCSGQSQIAQMKQLLCIVNFSTWTFSSKISIHVLQIWQNFFVGPVPKFISLAACR

SEQ ID NO: 164436 - protein, 118 aa, Heterodera glycines
LTQQMVRNGKAVTICDQMNMRKRNKSLADNQSIPLFSFVVDGGGRVFRQNIIHLLAQMERVLVRHFPEKCFNHFGTVLCCSYCSTSSRTLSINRLDSSKKHSGMGANALCSASARIIR

SEQ ID NO: 164437 - protein, 73 aa, Heterodera glycines
MGFVYAKLDHVFQRFEYCPCQLPRHLSHCMPYQLPEVNAWEKEANQMLDNLLCFTIKDSDIGPALLAELMANE

SEQ ID NO: 164438 - protein, 151 aa, Heterodera glycines
LVPVLVLLALLGGLLHTGAQESISTRSTRAEGTLMCGKVPASKVYVRLFKTNSDEISNALATAVTNDQGKFIIEGNTANYQGSEANIDPFLKIYHKCDQKEGKKGYRRITLRYPREYVTIGRVPRRNYSVGNLNLVLQYPNEAHIDELKGI

SEQ ID NO: 164439 - protein, 147 aa, Heterodera glycines
HNYHKRPIIKTLVRKRLYWLRSPSPTFADSDHSQNNESSIESAANLHENTATEERPRAESTSQNVGADATACMTTRPSDDNESYLDEQGLRWHRLFAVPDNDLSTLLRICIEFGGGTAQNWSNGNKCIVFGCAFAQQKNADALCPFR

SEQ ID NO: 164440 - protein, 153 aa, Heterodera glycines
IEDAYLHMEGSSQVRLRSRSQNGKYTYTHTTRTIEDADGKKLPQPVETRKQLDWHEYQIYLKLLDKDYQAIRKKRVCFLFGNVYFNLDIYIAPLPPALMYNEEQLMILETYTTRPIGDPEPRLPDFLEIDREITMESAYSMLNLARNNPGNVT

SEQ ID NO: 164441 - protein, 129 aa, Heterodera glycines
MSTIPMPPPPTQDEKDQQKSQWKPLEIGNRMRTTSEDSAESFDAYGPEWEGKGRGIGNRRELSSPNMTSSGRRMSITERLFGRPVPQERRNSLGEEQMGQEKPKSIAENKDFKELMKRQRKILGDDEWQ

SEQ ID NO: 164442 - protein, 64 aa, Heterodera glycines
SFTMLIFPHIKFSTLLKRATVNSSYYVSYAAYGASAFLVLVYVTEWKRFARYIPGLRSQIKSDE

SEQ ID NO: 164443 - protein, 67 aa, Heterodera glycines
WSLEDFRRFFFSLRCWMRRCYGFWAMMHILCLFRLITTNISILSLSVENSYFLLSISYTVVKNPHEK

SEQ ID NO: 164444 - protein, 86 aa, Heterodera glycines
VDKHEKSEAVPTEAKNESELIKSTKLEDEEESEEFPVYNKGEGIDTVEAQAAINVWEDNWDDETQETDFHIQLQEELKKCGYKPSA

SEQ ID NO: 164445 - protein, 156 aa, Heterodera glycines
DMEELWKQSQKIQTDNHELSERVSSLTRENNTLRTEHERILGDHNTLRTEHERILVDHNTLRTEHERILVDHNTLRTEYERILQRQLDDFHYWILCFAFFIPPLSILATARNNGLSFPVTVLSALAATIFCAFLWIPGILFALAFYFGLRKNAKKE

SEQ ID NO: 164446 - protein, 112 aa, Heterodera glycines
GENRLLVYEFMPKGSLENHLFRRGAQPLTWAIRMKVAVGAAKGLTFLHEAKSQVIYRDFKAANILLDADFNAKLSDFGLAKAGPTGDNTHVSTKVIGTHGYAAPEYVATGLF

SEQ ID NO: 164447 - protein, 195 aa, Heterodera glycines
MSQAFGHQLLHRFRRPALFALSSSKFCPLFRATAAFATDGAATKQPTASAAAQHQHQQVEQQQPSTTKTEWHLGNRVARLVMDDKRVNSLSLSAMEMLHDTLRELDARPEVRVVILAASGPAYSGGHHLPELTAESGTEMHRKVFNKCLELMTFIRQMQLPVIAEVDGLVAAAGTQLVAACDIVIASGRASFNVA

SEQ ID NO: 164448 - protein, 78 aa, Heterodera glycines
SSVCIVSVRARPNSQTPTLPIYHSLSASPAHLGTSNIGRHLATASRNVCLQLLNVVRIVAQLVVLVRKFIVSLQNRIT

SEQ ID NO: 164449 - protein, 204 aa, Heterodera glycines
MTSQKPAEDDPIGAEETVTTAADCVNELLETTEIQAEVDELVKSVVEFVSEAASAAADDVDHQQQRNAADESAKSRFGISSHEIAIPCKEFDRLLRKIGLKSGAKRQCPGKRMCPPRKVKASASDGVSAKIPKLSENGTAGGKQKKKKMQNIVEFDQVMASLLGNFEDDPIFLKCKEVQGMTKDLAQLTFQINQFLCHFITFIP

SEQ ID NO: 164450 - protein, 44 aa, Heterodera glycines
IRWQTFRRRVPASVHSPPYSKRISNGSITMVDQLDRPRQCVIVL

SEQ ID NO: 164451 - protein, 79 aa, Heterodera glycines
HFSLQLPPILCFHAFLCGLATKLRPILGQVSNLIWPLFEESRRNDGKAINHLINYFFFHLFLILHLFSLCYVCCLFVNE

SEQ ID NO: 164452 - protein, 82 aa, Heterodera glycines
QLSQFWYTDETCRKIVDECICTLNGAGRVACLCCRSVVQHFMDSKEVKKNSIELSLLECAGRSEQKFPQFFINYDNRKPLDV

SEQ ID NO: 164453 - protein, 133 aa, Heterodera glycines
SIGNRNKKRQNPINPTNYYFCFQLTILPSLASLLSPSVSNSSSSSFTIRWHCLPSRPAVSAVPAAESASVGAAESAVAAAVQQRRPVAVQSPTEAQRTAPERLAATAQPFAALAAAAAPRAARSNPTKRRPSQ

SEQ ID NO: 164454 - protein, 140 aa, Heterodera glycines; identical to SEQ ID NO: 162652

SEQ ID NO: 164455 - protein, 140 aa, Heterodera glycines
MTLKFVGNLFLGACIGQVFGQRIGAFIRCQGDSMLPTFYNGDILWARVWDPNDGLRPGDVVCLVDPTNANQYVLKRVSAVHENSRPSDPLAGRIEVRGDNATNSVDSRDYGPVPAGLVCYRVSVRLFPLNRRRKIETAII

SEQ ID NO: 164456 - protein, 97 aa, Heterodera glycines; identical to SEQ ID NO: 154665

SEQ ID NO: 164457 - protein, 127 aa, Heterodera glycines
MCRKHREFSAAKMGEDSQNKPRSLNKRDKVFDSEYYSLPAIDQLNIQVKEETEFKRFGVVDSHINFLAKIKPDKDTPHLGYETILFNHDKKPIGEIFEIFGTVTDTLYALRFNDESDAVAKLPCWVK

SEQ ID NO: 164458 - protein, 182 aa, Heterodera glycines
MEDEHSFSRQNNMRSPSKSASTPTMAEEPKKGELMAENNGTKGQLNSHKLLPVKNSLSATELFATANPMHRNGSTNSKLTNEFDQSEKQQPQAPHDDIYTKFYQPEPGTVFGRRLLNCEEFYGNFRRCADRKAKHSNILLSIERDLHSVQTLSKVAEFRSQLVKQRIAATSKRIQELESKSQ

SEQ ID NO: 164459 - protein, 105 aa, Heterodera glycines
LPSLEYFFNNFYKLQVPVIIRGMVNGWPAFEKWSFSYLNSICGHRLVPVELGSKYTDDDWRQQMMSFNQYLDDFVFPTTNPSQSGYMAQHRLLDQIPELLADVPV

SEQ ID NO: 164460 - protein, 46 aa, Heterodera glycines
TNNNNHVLYEKSPKNICSRAATDSPPYCLNSLAPLNSLTMRRKFFA

SEQ ID NO: 164461 - protein, 101 aa, Heterodera glycines
NSHILWHNFQSAEQIATFLACCSPLMLHDLFKEFCTNFKESRSGFPDLVVWNENVAKMAVVEVKGPNDSLSAKQQLRLHFFRTHGVRSVVCHVVARNDRML

SEQ ID NO: 164462 - protein, 144 aa, Heterodera glycines
EALCAVIERLPKEMQLLMARNIVLTGGNALFPGYRKRIEQELRSMMPEQFTLGVQQPSDPICHAWECARDAIQQQQHDAETSASSAADVGAATQFSPRLTAKFVSRAEYEENGPNICRRRFANVYNNRNVEDDDDEGTNSGTQN

SEQ ID NO: 164463 - protein, 190 aa, Heterodera glycines
SHHFSKQTQKMDNLSVYDSWPMSQRNSPRNHSSNSTCSSDDTAQAEDQPLNIGGTIRDRLASTSLSIASFDVISAGGGLNGGGGAAEHFGNSTPFTISSHNQQQPQQQSNSFAAYFSELNRLPIDHWLKSTSAANGPKKAFPSVTPSMPVTQHPIIPNNISEMFSKMHMNTSETQKKHQLTTSTPIGLHC

SEQ ID NO: 164464 - protein, 203 aa, Heterodera glycines
MENAATGGKRVPRFSHSAGTEGAEGEKEPQAEEPPSAGTAGADRPAEDHSLLLAQLLAAFALFGLVTALLFQLPAFRVRSRIGTDGPVPIHQLDPQMAECAKTCRIELVESIPQNVSFHLSLGNSPALAIPTFSAWMQLISEAKHSLAIAAYKTSLRGKHVLGEDQGNYSTQGETVFDALLDAGLRRGVGIRMVENAVAKDKG

SEQ ID NO: 164465 - protein, 56 aa, Heterodera glycines
RAHTVLVSGACGSVASNFVNYAFEKRPPSNYVNLDELILNSDWNYLAPKVRNSARY

SEQ ID NO: 164466 - protein, 205 aa, Heterodera glycines
  unsure (1)..(205): unsure at all Xaa locations
HRANAQTSHHRQGKVSRISSKRRVEGGRGGGEGGXGAGGQRLIHAPLLLTMPLSLLQHKAPCLAHRMPVVRRLFENTVLLLIGHNRFTFGRFGANETQRKAVELGQMDQFPVGQLKRMETVQRVQRVVNGVDVGHMVTQHQFQLPDSVVQSFILLDEDGVRMGQLGNWRTECKRSTAMQSWEVEHWERSGGRIGGREKQKGKETA

SEQ ID NO: 164467 - protein, 199 aa, Heterodera glycines
  unsure (1)..(199): unsure at all Xaa locations
MVSMLCLISGLFLLPPDIHSFSSTPSEQDANRQIPLTTVGRLSCVTEAGCVLSDTSQLNFLVVGDIGGLPVFPYYSYAQTKVARAMAKIGRRHRTHFVVNVGDNFYFNGVQNAFDGRFEDSFEEIYDQPELLVPWYTIAGNHDHLGNVTGQLARTDFSSRXLRTFPRLFYKVRLSFDGLSPPSAVRVDLLMLDTVVLCG

SEQ ID NO: 164468 - protein, 135 aa, Heterodera glycines
ATKQTQWWCWCRVVHSWRQPDHAQRVHWWWCGCAPCQHWHGRWRRFNARFFSSSPAAANAHVFKCVCRGIRPMVLQRGGRCCIRGRRISVIRHISLIYDFDPSTIDFSFHQVLHFHPRIDENKKVICEKKKKKKK

SEQ ID NO: 164469 - protein, 166 aa, Heterodera glycines
MEDEIKKRKKNGRTHRRAKSHGAVRPIFHPPTETMKGWDKTATDKWTIGKEERRAQNAEEPTIHSSAIKTQKNKITVAKRRYSVFRHDSLMWEEMPQFTESDRRLRKSVPSSPQTILVLAGLFVCGLILLISGLIVLITNWQNAKAIQNGWYYHVAGCTMLLLGFS

SEQ ID NO: 164470 - protein, 189 aa, Heterodera glycines
QSKGCKKPVRSNLRCPTCVKMGLPHAFFCSQTCFKASWMEHKLCHKDDSSNINEYNPWPLYQFTGTLMPAPQSARRAVPEHIPWPDYALHPECVSLEEQNALNSGQIQVLNYEEQLRMRLAAKLGRQVLDEAARAIEPGMTTDEIDRVVHEACIERECYPSPLGYYKFPKSCCTSDNEVICHGIPDKRA

SEQ ID NO: 164471 - protein, 63 aa, Heterodera glycines
AFLQSTDQKLLVLLTALTSVQGQTVRLVDRLNVLARDRLQHERSSFIQHRHCSNLFPGLFGRF

SEQ ID NO: 164472 - protein, 109 aa, Heterodera glycines
FNESLLRQLEANANANGQTQSVQHDAVAAHPQDQSVTPAESAVTGPSPTQLEALIQDEVNRRVAAQLEQSQLTQGVRADHRADLDSQTALREADDLLHRLGRVSLPTPE

SEQ ID NO: 164473 - protein, 189 aa, Heterodera glycines
MVRDIILFCWRGGINVYDIYRDCFPQHSKMAAIRRGILRAKAFHSNDTNLWEPLEEINFRGGAPCLDDHAITNYLNTPRVRETLHIPPNVPNWESCNDWVGILYTTEYSDMSPFVRKAINANLRVLLYSGDTDMACNFLSGQHFSAQLGLATIAKKKPWYFRGQIAGFRTEYARNLTFITVRGAGHMGP

SEQ ID NO: 164474 - protein, 133 aa, Heterodera glycines
VFSKNCPNFLNFVFSAPPFFFFASSVSTTFRPLPMALPPADSFASLSVPCGAAVSVQMQSLFCLCARRVSQLCTPSRMCELRDALPPAVFDTLTALQADIECLRHYFPNSRKNSADEGSPQSHFFLPERCFVL

SEQ ID NO: 164475 - protein, 203 aa, Heterodera glycines
PIKNFAGTCWTVPSIFNSPHILFDFFALLCLIHMIDFKRECNGRLGYTLVEDDSSLLGGITFRSIVSGDKLPLLRDSPPESHVEPVAQLLRSPRDHMDNIFNPADNNIVDNTNGFALAPYTEQRRAPSGVLAQQTMQRFGNAYFMGNSNNSTNNTTTSSAYSLATIGTNTTTYSGGACNGSGGTLVTNATGTTGGRRKEVYTD

SEQ ID NO: 164476 - protein, 201 aa, Heterodera glycines
MLLGRVCIVTGASEGIGEAVARTLALDGGATVVLVARRIDRLEALTQQLNALGVPSERLMAVKCDVASSENVRAMVAQTMERFGRVDVLVNCAGVMFFIQSSKGYTEEWTRQIDVNVHGTTNVVGFVLPLMVERKNGHILTITSDAGRRAFPGLAVYSGTKFYLEAFISALRQENVENGIRFTNIQPGDVATSLARRSTDT

SEQ ID NO: 164477 - protein, 201 aa, Heterodera glycines
PSKTSSPTGSLLLSEGEHSTASGSLVNVRMPNIKVFSGSSHSDLAQRICDRLQLEVAKAALKKFSNKETNVEIIESVRGEDVYIIQSGCGEINDHLMELLIMISACKIASACRVTAVIPCFPYARQDKKDKSRAPITAKLVANMLSISGADHIITMDLHASQIQGFFDIPVDNLYAEPAILKYIRETIPHWQESVIVSPDA

SEQ ID NO: 164478 - protein, 206 aa, Heterodera glycines
FTIWFEEHFPSGKQKHFCQFLYKICTTYCLVNAYKNDDRLMKLWLKLTENFPESGFAIMEFAFSKGSCRQLAKFYIHWSTMYQSISWWNKAREKLQLGQKMCAMPLDLLHRAVDELEASVMKVTRSGENSEETEADEMVAVSLEQSRETLGKLRGLGRRHFAPIIRTAQGPPGTLSTSKRNTSSKNAKNNEHFEILADEFTECVSL

SEQ ID NO: 164479 - protein, 204 aa, Heterodera glycines
MNNENGTLPSVSTIKKKANATGGGYGVVIHSFDSQNKNSAQSIVYVDHNRPLYVVPRYLFDVTYLTNQGFSKSQVNKRSIELGFGANIQFESRGNQIVYFDRCSKGQDWIKIGEQLLLQDKDRRFFFEDKFIDAKNANILLRAHGCVSDEEVRRFFCHSFHSVDSFRVPYAELQKVIPNVLYDLFVNIDLDMHGYEPNMESAHC

SEQ ID NO: 164480 - protein, 202 aa, Heterodera glycines
MNLRPKAVNFDDVWSKLRETLEAIISLKPIERITWDHNFSDIYFVCVSVPEAQSRRLYTAVKNSLELHTISIRESLLRLSGDQLLSAYNSEWEKFHKGAIYLHNLYGYLNKQLVKEKMDAESQHPFVVDNDSDGLYPHLGVGDLAFSIWRNELLMPLAAQLVAHIIELLGRIRNGISASFGIRISDLRGAVLSFVDVNESIH

SEQ ID NO: 164481 - protein, 79 aa, Heterodera glycines
MSSPPSPKASLILEAQADFALKLLREVSTDDRSCIVSPFSAAVTLSMVYAGAKGKDGEERGNCLQRVGPNRRAQIFGAF

SEQ ID NO: 164482 - protein, 205 aa, Heterodera glycines
MAKIKIKWGTKELNVDANPEEPPLLLKAQLFGLTNVPPERQKLIVKGKTISDEAWNGIKIKDGTVIMLIGSTESMLIKAENAESSGHTNSTETEPRQQFPIGLRNLGNTCYMNSSLQCLKIVPEFETALKQYNPNQSVDGSNQRIKLFTNSMKKLYNEMNVLAKDQTADSPEVIPLFLVHVLRQTFPQFDTQDERGNHQQQDANE

SEQ ID NO: 164483 - protein, 87 aa, Heterodera glycines
  unsure (1)..(87): unsure at all Xaa locations
VLGIASVCSLLSIIATVLSLPSRYSXDEPNAAXVRYGVEAFRVNTDSLCTDLMDVPVVVTPPXKPPGNRFDCIFRAKRQLPGRWQCA

SEQ ID NO: 164484 - protein, 75 aa, Heterodera glycines
NPVFFSIVRCFGIGSFSALCHTLFPAPQMAFCAVRFGSPPLIPIVLRHFPSFRWRQNVPKREIKTKRNEWKRNAS

SEQ ID NO: 164485 - protein, 97 aa, Heterodera glycines
GVSFSLVRTRFVPAHQLILKNFPFDICRLSNLQVLYLGGNALIDVPDTIGQLSELTSLGLADNRLEQIPTAIASYRNLRNLALHNNRLKKKKKKKKK

SEQ ID NO: 164486 - protein, 202 aa, Heterodera glycines
MAPPLPTVSAATVAPTPAALAIDDFRLIAVLGRGHFGKVILSQYRRTNAYFALKILKKGDILARDEVESLMVEKRILEIASSSKHPFLINLHATFQTHDHVFFVMEYAMGGDLMRHIHDDIFAEDRACFYAACILLGLEFLHANNIVYRDLKLDNLILDREGYVKLADFGLCKEGMGPFDKTSTFCGTPEFLAPEVLTENSY

SEQ ID NO: 164487 - protein, 78 aa, Heterodera glycines
FFFFFFFFFAPYCFILLVKRHQNSKNVRQFCRRHIKMVTHQYTIKRRKKMFGKNKHLLKRSIALDGSITIITNSGKIW

SEQ ID NO: 164488 - protein, 187 aa, Heterodera glycines
MYQFPTKIGSTSTKFSTSTLPPTPSPFSRPMHNSLKPLQPRPTTSDAQHSFREKSAANDGELMLKQHSRSSQVPCLKGLTNHGNTCYFSAIIQCLASCEQFVKFFVCNHSEETTDGSSTDQSSTNFMPLLTNALSATLCCLWFNNSLADSSCYRLLQLISKANPQFVFSQQQDAHECLIWLLNRLHD

SEQ ID NO: 164489 - protein, 174 aa, Heterodera glycines
LVQLISQIPSLSHLALDVAFLNAHFLRRLFAGGVHSPGAGLRSLRLCRLRITYRALFSIGRWARSLVDLETSHMPAVDDRFLVLLGKNCKYLQNVNFNGCKWVTDKGVASLARNCKLREVRIRGTSCTDKSVYAFAQFCPTLEWIAHADFSGRPNFSDKALKCLRDSCIQRVIC

SEQ ID NO: 164490 - protein, 202 aa, Heterodera glycines
IDWSSGHQFIVTDPNNGELLCDVSNCGPLEAQLAVAAARRKFPRWAFEYTAKERGAVLRKWCELLGKREKQLAELLTREQGKPLAESRGEIQYAASYLDWYAAEARRCYGQVVPASKPFRSHVHLREPCGVCLLITPWNFPAAMIIHKAADALAVCCTVVVKPAEDTPLTALTLAHTSHEAGVPSGVFNVIPSDRDETAEVS

SEQ ID NO: 164491 - protein, 52 aa, Heterodera glycines
AEKGTRFGPLSLKLPKELFPVAGVPLIEHEISWLCEQLENLHNVDIDGFYAG

SEQ ID NO: 164492 - protein, 124 aa, Heterodera glycines
LTPNLSFNPITLSHYQRPLLLLLSFSVFSVLISAWGKAQTDAEQVENWHTKLPARTISIACACRTAAAPVFKLSSSTTADRRFSFEFQHISSEAEGSQKQAAENDRKKLGNHFCKLNFRKSFNK

SEQ ID NO: 164493 - protein, 178 aa, Heterodera glycines
QNCPLLLPIMAPKCLPPELLFELVPLFPVEETLPNVFLSCRLLHNFLLPRVDKWKEEMQRNTEEMDRKFEEMEKRLTTKFEQFREDTFELLDTIVERIEDGNKEIAHFCRHTAQTMDLLALNITTSVSAFKRRKQQCGQDTDSAMTAERTFGGGQLTAAAPSAATSAACGGEFGAKVN

SEQ ID NO: 164494 - protein, 55 aa, Heterodera glycines
TEAEKAHKAKPGGDTIFGKIIRKEMPSTILYEDDKVLTFKDIDPEAPINVTVIPK

SEQ ID NO: 164495 - protein, 71 aa, Heterodera glycines
GHQTRDAPNKGRTLISGEGRMIRDKGKHYAKKGKHAKSINLINYFVAIQQYLYLNFISNVNYVTNKMNVNT

SEQ ID NO: 164496 - protein, 63 aa, Heterodera glycines
RVFSPSHHSGTEFDPEEDDPVLEPSWPHLQLVYDFLLRFVESADFDCRIAEKFVDHKFIVNVK

SEQ ID NO: 164497 - protein, 209 aa, Heterodera glycines
MEEYEASSVRQRAKIEERDGKRAKANAQKAPKNGEKSLQIGWIVCFVLFTFAIGILLMYQSRETPTNYQKEVNRECDEGTGQCIAIADYTRDSGKTWHRGIFYVNETTFDFEKMLEKKIGAEAILKCPANADAPEGCVPDHGRLSWPYVATMAIMPFVVGTLHHPTQMQQRTQSALVIGMGGGTLDMFLHRKTPSLNITIYELDPMVVQ

SEQ ID NO: 164498 - protein, 149 aa, Heterodera glycines
SPNSADVCPNHSSSLRAFRLLRSRRSLSAFAVRLSSPSHAKAAPNCRLNAKTAVSPAPQTLDNRRRGKPKANNGATTAAGNGRIGNHRQHRRQWGRTMNEKGRNSECVTSLFTTIERRFNYEKPRSRRAPSHMRNGSGGTSDCASKHRK

SEQ ID NO: 164499 - protein, 207 aa, Heterodera glycines
MLANLSLPMVLLAFYSINSKLLIVSCQQSSNFSECGISDFEPQLANVSKMAIGTNHVYKGQEVGDDKALPWIARLIFGKSYCSGTIVGPRHILTALHCTEHNVAENQIVIAYGSANLKQQQQLTGVAAVKLHPKGTDTQRNQINDAKADKNVIIKAQGLQPNPYDMAIIELKNPLAFTANARPICLMEYGTNDQSTFVVAGWGRTSP

SEQ ID NO: 164500 - protein, 112 aa, Heterodera glycines
MPSSSANRPHSWTSWRHRTDNRPAIILMLYCIVDLDVCLIPLEMNCYGGSGQGFTSWILFRLTLLLMARMTCALTTAMYSGHRVETFRSLECPPRMVITHTIIIPEYPSKSL

SEQ ID NO: 164501 - protein, 203 aa, Heterodera glycines
MCLSNSVIMLSRTWIVAICFYIFFGTILPFSEAIRFYVASNDKKCLKEEIHKNIVLTGEYELSDSVGHTTTVHVTDTRGHTLYKRENFPEARGKFAFTADEYDIFEICFQMHGPTHQQKLNREVHLVLKHGVEAKNYEDLAKAEKLKPLEVELRRLEDLSDSIVQDFAYMRQREEEMRDTNESTNSRVLYLSIFSMLCLLGLA

SEQ ID NO: 164502 - protein, 68 aa, Heterodera glycines
LNSIKRGALALSLAFIICHFSYVLIFITAITITGDGSVVKGYLSLLLYDQWALLWQKIVHHKTHCVGY

SEQ ID NO: 164503 - protein, 40 aa, Heterodera glycines
FFFFFFFLNERNIIDKNKYKLDFKKFESLSATSLLLSSSI

SEQ ID NO: 164504 - protein, 208 aa, Heterodera glycines
NITFTPFKRIQKMQPNYYVALYGNGKEPQNSAKNYRLLNPTVDLIDIIGEETNCAEFTTDKSCKRIKNDNSIILDGLVRNKLYGVLLCSVIDPHNTNYPVNDTKQYSKPLVYRLFLQARESVLNGSMENVNKERENYIFWIVGGSGILCAFLLILIVTIFFAYCRQRDKNRKNQANMEHLRRNRDQRYTDFPARSREDQWELERRNLI

SEQ ID NO: 164505 - protein, 96 aa, Heterodera glycines
LFEYPKRTLEKIDFFVFGAVPPNRCAQIYGETESFGNSFPIVCTLILRWIFAPHNCLSTPNGHLKKSIFLFHKYFSEIALKRTKFYLQVNFSTLML

SEQ ID NO: 164506 - protein, 46 aa, Heterodera glycines
IWLTPTCIFYISTFCSLQFYIHCDCPLLSVKSIHSSLTIKHYSPLL

SEQ ID NO: 164507 - protein, 210 aa, Heterodera glycines
QALVCRGIASAPLAIGCPSGKSFDPKTLNCIAAPEQCAVLASAQRPIRQLLLHLYCSKAHPPKKDIPNDEDGIRMRSEGDEPSQQQKPAIVQVSSDAQQNRCRNWYVVCESVEEPELVFCDNGKMFDLSKRICRRILPGDRCPFNGVCRGWEWRMSPVGECRRDFLFCNGIRPQLFQCEKEQEVFRDGECTAASSACDVCQPGESKRSTD

SEQ ID NO: 164508 - protein, 210 aa, Heterodera glycines
  unsure (1)..(210): unsure at all Xaa locations
NAVQDLRLKIFHILRNKFGINNFKHKQEQAIAAAMLGFDAFVRMPTGGGKSLCFQIPALEDRGVTVVISPLISLIRDQTMKLRNGTTTIPCAVFDAERMARDVYINRIPTFKLLYVTPERAVKNRQFLKYLRYLHRMNLLARFVVDEAHCVTQWGNSFRPDFLQLGDLMKKFRENAEKKVPIMALTASTSESDCRXAFEYLGMDCESALW

SEQ ID NO: 164509 - protein, 211 aa, Heterodera glycines
PIHSHIVQAVLTMLEKGLNPADISQLHQAYSDASNSPPPPMELIRHNAFLDLLIDALFSANGQRIHAEHRPKYIFLLAFSCSVAEVRGEQGERTRELGELREIEQQLEQLANILHSPEDILLSLEALLRLCQTPVVAVGILHYLKTLLLREDLLAEPSSLHFALIDQIARVHPNLHSRVFNLLCDLYDHQSNRNEVAEVVMERQRHVVERF

SEQ ID NO: 164510 - protein, 151 aa, Heterodera glycines
MGWAAAATGAMLLMSFTSITLLIERVQAKPSTPVGGPYSEHGSQCNETWRPNLIEPLQKCSSTQAKNECQKGYHCNGAGFCCPEKGTICRMETDSGHESKDEPYKHIRRYAYDVNLGGCTIFSYFGAGGNFNNFKKFYECKKFCDGIKKTK

SEQ ID NO: 164511 - protein, 57 aa, Heterodera glycines; identical to SEQ ID NO: 162506

SEQ ID NO: 164512 - protein, 204 aa, Heterodera glycines
MFFSYSILVSKNSNFAVIWKYMHDRHGIVKVSKRELLSIDIARACEDLQNYIPTGVLLKSELRDKMSLYLLAQLSYGITLVFQAHVNYLITDLESAIKSFARFPEENKREKTPRKSTGRKRRLAELDGVVEAVMAVPRGMEQEDMEEEDDEGAKRRRISAPRKASKLDLADPSAYVDQQLPAARDVNDQSMLMDESSRLDDMFM

SEQ ID NO: 164513 - protein, 117 aa, Heterodera glycines
RAFLIVPQFLLSVANLPWPTTFCCFALPKGHPKSESPIRPKLDEFGLAKPLIWSLQWAVVGNSFGHGNVAKVAKMAPVETEKAHEKVADKRKPKAHRNHSHAKDEKMQKQTKKIAIS

SEQ ID NO: 164514 - protein, 57 aa, Heterodera glycines
FFFFFFFFNSSFIRRKFTYKTVLGVISYRLLGWSERERGITRKFGHPMDEWPKWRNA

SEQ ID NO: 164515 - protein, 206 aa, Heterodera glycines
KELYPLYPSNSRVIDLRSKITPAPMSKTKQFFNELQRIAGSSPTKSSSSLHMKRAYESERWFSPRVDSDQADTSGPPRRSILTQSRLQLLSAQRGRETRKPYWRCPMPSARSIDTEITQPSLVDIIATPLARQGPIKPFRHREPETGRKTNSFAVDEDILTVEEKEKELMSKVQPLEAPKAGFLGTPPPLVDLFEFSDIIVRGPQL

SEQ ID NO: 164516 - protein, 45 aa, Heterodera glycines
LTKSVDETCQTFKVSSEGDYRCDFSGLLPCQTEQRKKAFQIGRNE

SEQ ID NO: 164517 - protein, 36 aa, Heterodera glycines
FGLILLPFWIKFSILHPPKFETFSTYFPIFSNHFWI

SEQ ID NO: 164518 - protein, 208 aa, Heterodera glycines
YWKFCLLFAMKETNSKNSESADICITDQPDNERREIAELFPNMDLTEVFAEYGHLSSEAIIGLILEKRHQIPLKGRKACSFFVGLSVWWPRWLGGRVVRKLLSSFGARVTGIPTDSLLDQLETESGDHPRRQSVKECMECSVCWETTTVDELCFCDGTTMTATSSSSAKLTTETHAFCRQCLERHARAAVEEMPLAKGGLGLRCMAAD

SEQ ID NO: 164519 - protein, 211 aa, Heterodera glycines
VDSDDEQGDTLAIGGPDSWYALALRDTGTVLKKDTGGTGKGKKQGKERDPNAPKRRRTKKPKLSSGPKLNTAQKIAAANLAGVLSDQLSVQNDKNDEATLASQEHVQIRGNDARHLLIQKLMRTNRSSVVVLRNMVTPEGIDEYLEDEIREECSKYGRVTDVVIVQEQETHSVKIFVRFAEPLQAEEARKAIDGRFFDGRTVAAQSYDQIL

SEQ ID NO: 164520 - protein, 197 aa, Heterodera glycines
MSKEFRRFDDVQLRLRSFDERMSKVGTLDVPPAQIVSSTVRPISAKSTNGDSAVLVPSTTMAPPFVSSTAATSVERHSAESSEEEETDKRHRKGKTPLRGNGGLSISAVWEGVKRMMGFTADCHNGGYKTIGGDCICPQFFEGRACERIVCANNGTRVRVAAFGGEEVCKCTHPQYISGKHCEVVHCQNGGRLLNDG

SEQ ID NO: 164521 - protein, 51 aa, Heterodera glycines
FFFVANLYMHAHASNTSSTDLRAILTQFTVLATNFAHHTQLVLIGHRQLRF

SEQ ID NO: 164522 - protein, 189 aa, Heterodera glycines
KERKYAQTILQVRKSGNRLLCSLLIGNVCVNSAISILFDDLTNGTIAMIVSTTGIVVFGGIFPQALCVKKGLAVGACTIWVTRFFMMLTFIVSYPISLILDKLLGEQVESYDRERLIELIKQQKRVEKASRTGSNASTKSGGSGAGLYNGVQTSLAAVSSDEASRTGSKGSLKIKFTMHTDGSRVGEPT

SEQ ID NO: 164523 - protein, 203 aa, Heterodera glycines
MRSWTLTFIAAALLVGSQAQQAGFNVNGMVDTLLSRAEDHILPSIDIPDVSVSELFKVLFFNVKASLDVSKGWLLGPKSVRRFDDSKLTMEDQYTFSVDIPVGVNEINFGYNYKTKVAGISGPRGNFTATVGATAVTVRASVTIYDEFCYAKFESLDLTQLGNVTVSATGLGVANSIYSKMLTKFAESQRDKVQAQIAEDFEE

SEQ ID NO: 164524 - protein, 164 aa, Heterodera glycines
TMERECDFFAFYMDPSDCPKELLPPKFGGISMSISINRCKEVFRSIKRALQRDKLRSEITKLRLLSTFDFDEKSAQILLTQIERIRSTLPKVRSLNIELRAVEFNPNQDLYSNDDFADSNLIPSSASACSHVALFFLNWMRKMKMGDIEIDGCVRLDVDYHCGE

SEQ ID NO: 164525 - protein, 107 aa, Heterodera glycines
SLSALSSLPPVSLSLLIILSPSHSFSLSVSLCWSFSLSPSPKVINPSLRSLGSFSEAMLNFLQSLNQTFAQQQQKAPDDEAEEGEEMKEQLAEPTIDALVEERMKVN

SEQ ID NO: 164526 - protein, 209 aa, Heterodera glycines
IDSSNGSSKFQVDLLRWIKSEFPEWPQVIAGNVVTMRQAKLLIENGADALRVGMGSGSICITQEVCAVGRAQGSAVYNVARFAKTFGVPVIADGGIRDVGYITKALALGASTVMMGGLLAGTNEAPGEYFWGPSGVRLKKYRGMGSLDAMEANECSQDRYFTCEDGNIKVAQGVTAAQRDRGSVFKFVPYILRGIQHGLQDIGVRSIAE

SEQ ID NO: 164527 - protein, 126 aa, Heterodera glycines
NIYQWEKQMRKKPILCINKDINNNNIKLWCFNPSLALFKAVQSVPRSLRTSALLSAFVGTEPIPVAEEAGDVFGELEEHRNLANNGNEFDERKGQIKEPNESDWKQRENGQSGTDWEENDEQTDLD

SEQ ID NO: 164528 - protein, 203 aa, Heterodera glycines
SYQRDSDNAERQFRAALKLKGPNDDAELSTLANLGLALIFLSSGREAQFYELFDSLSPSRIPSQANSLRSAAHLIHGFHYFLHARHNECKKQLMDSIAISKEEDMARLQSIALLLLAKLLSSKDVLKAASEWATKSADVGLLLWANSVIRSVGDASDSKKAEEEICAKRRQFDTAREESARGNAHALLKWVDREMPSAATFRQ

SEQ ID NO: 164529 - protein, 191 aa, Heterodera glycines; identical to SEQ ID NO: 149086

SEQ ID NO: 164530 - protein, 177 aa, Heterodera glycines
LKPNKRNAKFLDSFLSDLLSVHSSIVSRQGDPGPVLQLFRLLLNDRQLQEIEENPDGYFEFTALCELPIKLSVGKGRPKVKTLAVSVLGSLLQLNKQSQMYRRVLRLLISLLDSPYASLREQAAEQLFEFFSCESDDSEHGTEMALKLLTETDWGRGREGLGENRRRISAILLANAR

SEQ ID NO: 164531 - protein, 183 aa, Heterodera glycines
MSKPKTLVERMRLLFSTSNGADIQFLVGESDEKELIPAHKTILASASDVFEAMFRFDAGNTGRKTSSAMVPSPVVVPDVEADAFRTMLGFIYTDDLSGMDGDNLFDVLYAAKKYNIVGLVSAYLDFPIPSLPNVFFAFAQARFLEEKDFARRCMEYIEQNMDTLHQSDAFLEIGQSLLCEVLD

SEQ ID NO: 164532 - protein, 129 aa, Heterodera glycines
SLTKYVDTFIGVAGPNHGISLQLGALSVPGCLLSVLPVCNAQTGLYSGFCPAESAFLQDINRQQAYEGQNRFSIYSTRDQVVGHKVCGRVTSQLPGQHGEKVYDNADHDGAFLHSFPVQHAMVLNHALI

SEQ ID NO: 164533 - protein, 178 aa, Heterodera glycines
YKISPMPSIIITATFVAVVLFTCAFLDLCHALTCKSRSITEKNGRQPKDSVLCENGQDVCRAFFCVANHSLLFIQWDCATFSKKDKCPQKDGPNTANSVRVDHGLPQSDDWHCVCEFGQVGEEMGNEHISKMDPTEPTPMADSDVRASVSPLFVLSFLYWVILPLATALYRQLLTWAD

SEQ ID NO: 164534 - protein, 86 aa, Heterodera glycines
MKPTFNFNLFASVFLVLCVASFVLCEHKRAAAAEACNHPKSVGTGNLSLKRWWWDGRHCKQFTYKGQGGNTNNFPSKKLCDQVCKP

SEQ ID NO: 164535 - protein, 95 aa, Heterodera glycines
INCGAEAGARRYVDLMALIEFVFNSGARHRELLTYGSNVLDPQFDLVMPPVLAPKCPPKDPSNCTNCCPIKRNLKITIIYRIYPYSFDYPISFIL

SEQ ID NO: 164536 - protein, 199 aa, Heterodera glycines
MSAIRKKLVIVGDGACGKTCLLIVFSKDQFPDVYVPTVFENYVADIEVDGKQVELALWDTAGQEDYDRLRPLSYPDTDVILMCFSIDSPDSLDNIPEKWTPEVSDWAELSRPYFTLKVRHFCPNVPIILVGNKKDLRNDQQTIRDLSRNKQEPVKSEQGKAIAEQIGAYAYLECSAKTKEGIREVFEKATQAALQQKKK

SEQ ID NO: 164537 - protein, 78 aa, Heterodera glycines
LCVLVSVFIFVNILCLYKLLLQLINQTNQLAEQTICRIGYILFIISEYSSSSTKLSSVHSSPIIIISSNTISCFFSSN

SEQ ID NO: 164538 - protein, 77 aa, Heterodera glycines
CALFSQGNPREKKSFPINLNIPFILFVFWTIGPRKASIINNYKANLTNHRFHPFFKMSFTLRHVKMLMMIICFSSDK

SEQ ID NO: 164539 - protein, 96 aa, Heterodera glycines
CELAWRNNYRMLELSRTCQAAVISITCVIMRLTGTLGFLFYFRCVFLQAFVWQYKTGFRWSAFFTSRSLFLTHSVVSGLFTYVLFWVYVYGLVHVY

SEQ ID NO: 164540 - protein, 68 aa, Heterodera glycines
RQQSQRINILLLYLDIIRMFSLSLSFGFNSLIKRKTESRDGSKTTGKWAGVGGGVHSIHSFLTLGIRF

SEQ ID NO: 164541 - protein, 120 aa, Heterodera glycines
MIDESCLFDSEEEDEEAKKKTPEERKYLFRKELRSMLFGFGDERNPNDDTLEALEQIVVEYVKEVCRKALEVGKPNRVNLEDIHYLIRRDQKKFSRVKELLSLSEELKKARKAFDDAKDL

SEQ ID NO: 164542 - protein, 141 aa, Heterodera glycines
  unsure (1)..(141): unsure at all Xaa locations
RKDAGQKLAKALAHILPQRDNIVVLALPRGGVAVACEVADAFQAPLDLLMVRKIGAPGHEXYGIGAVVEGNPPELAINDEARXITRPSEAYVPKTNAXNQLEEKDRRPITYLGDKPPVSLEGRIAIVVDDGVATGGTARVA

SEQ ID NO: 164543 - protein, 133 aa, Heterodera glycines
  unsure (1)..(133): unsure at all Xaa locations
TEIAGLKPEMLCHTEHILGHALCVLHSKTLDQSLELIHPSPLSRNGTALFTPSGIAPRRLLAXSDVRRAGLHVPIPGPRPMYSFPRSRASSPGHADYYGKAGHNSYTQPRNVTHLRRSEDASTATRPHLSLPQ

SEQ ID NO: 164544 - protein, 111 aa, Heterodera glycines
MGVDSADDDSVPDPIVIKQGESLSLSQLVQKIEHLQNRTVQELTATLRRRTYKMPVGPPDPNGDRFFQNGHLLVEDVVYKVARKTRNSIHGIVQLHAYMGIPLLDEVNYHF

SEQ ID NO: 164545 - protein, 145 aa, Heterodera glycines
FFFFFFFFFFFFFSINFFIFNNFLFHFCRQNFVQPGFSLSFFNPFICFFRFCLRIHAQVGGCWPSSKSLSAFNVSSWHSIFFCAGKQSRREEPIGSSVKHLSWFSMPKYFGGNAATPPTHLSTQPMSKRTQKTNGKLKKDFIFYQ

SEQ ID NO: 164546 - protein, 68 aa, Heterodera glycines
TSRIYSKKKEDEKIIGGTEMWENAQVTNERCPSCSHDKAYFQQIQTRSADEPMTIFYRCANCGHRWKE

SEQ ID NO: 164547 - protein, 171 aa, Heterodera glycines
MTSFASQNSVSLAVQNALHQILTLPLPSPQVPAAQNEQSRREEEDEASAQMDFWTAASLNTENIRDYNFEDEINVKNAAGWTPLMYAAYLGHRELCQLLVLRGADVEAANERNQTGIMLAASCGAIDVVRILLDFSADCNRQDQYGRSSLHYAVKYYHAPVVQLLLENGAD

SEQ ID NO: 164548 - protein, 197 aa, Heterodera glycines
MKFVTSFARRWPLSLSVAASFGRVGATRAASTLTIRDALNQQQCLNPSPLIAPIDRRRFATVKKKRQWNRTAQQSEDEEDDEAEEEEEEEEDEEDEGMPTDCRNKEFTMLSRRLDTVVGVALKTSISALGNWILQGRVRVNETVVIKKAHEIEQGDLVEVWDAPYEENARLATVHRLRIVRCRFDQRKGYVIKTKCW

SEQ ID NO: 164549 - protein, 78 aa, Heterodera glycines
SNQATVFLPGYNIVGDGTPQAFIPILTAQTEEELPLTRKRYRSASFVDEVYPFAWRNFSAAGYATMYGEDGHDFGELL

SEQ ID NO: 164550 - protein, 194 aa, Heterodera glycines
MSTVPSTSSVIGTQLSDFNQHALKGMAAGAFAAAISKTTVAPMDRVKLCLQLQNAAVSTPHMPVVRLPSAHSLPYRGIVDCLRRLCADEGIRSLWRGNSAAVIRCFPHNALNLAFRDWFRVAFLDGIERRKRPIRFVAGNVAAGGAGAALTLVFCYPLDLARTRLAVDGGVHRGLFHCFSVIRSREGTAGLYRG

SEQ ID NO: 164551 - protein, 143 aa, Heterodera glycines
MLSSHHRESLLLQYGRSQVLYSDEFCKLTDEILIIKKFFFGTLRPKVVLLKDIRVVYFDEQKNQQKKYAHRRVWGRAPNSLYWAADFKRCLPGVDKCNRSDVIIDMEDGLLKGFTVADAQSFLSVIRLFAPMSTIIVDNLDIA

SEQ ID NO: 164552 - protein, 133 aa, Heterodera glycines
  unsure (1)..(133): unsure at all Xaa locations
ASVCFLPPIVGTVVTLECLYSGMSRMNRLGRQRADAFRVNSDSACTDLIYVHVGLTPALRPRANPYNSIFHAFHLRPRHCLCTXPRRYQLIPXPPGKTRTSGQLSLPGGSRLLGQTWRTARPDPPCPLSKITC

SEQ ID NO: 164553 - protein, 158 aa, Heterodera glycines
GSRAWTFCGTAEYVAPEVILNKGQDSAVDLWSLGIFMFELLSGSPPFASTDPMHTYNAILRGVQLLAWPRYMGDNARNLICKFCRRDPTQRLGYARIEDVRQDIWFKNFDFASFRNHSMRPPIRPKVRSLTDTQNFDRYPSTDNFACGSDESGWDDDF

SEQ ID NO: 164554 - protein, 194 aa, Heterodera glycines
MSKFFRGAISSSESSESEESADEQIVQTRTIARDFAYPSDSEDEGPKRIVRTQKDKTYAELKEQIRSSRNARNIKDIAKLQTVFEAQLKLWEKAKTFIVRENLSIPRFYIRYLAELEDFINEQWEDKEGRKIMSKANSKALASLRQKLKKYNKDFEEDLGTYRTEPDPMGYSSGAAEDDEDEEIPTAPAIATND

SEQ ID NO: 164555 - protein, 132 aa, Heterodera glycines
LSNPFRLFFLRNKQMPSLLLLPTFCFFAFAVVVAHSQMTFSDGWGKRSAVAPFALLADRHMAGNKRHEKPRAAANLFISPTDEDALAMSPAMEACQVGYAQRLMQLHEQMLTLFSTYQQCQTKATMMETKKA

SEQ ID NO: 164556 - protein, 174 aa, Heterodera glycines
DVQLRAQEEIDTVCSSENPTYEELSQLKYMEAVIKETLRLVPVAATVVTRVCSQTTTLGQILVEKGTGVTIDLYTFHRNKELWGDDADEFRPERWLDIDPPPASAYYYAFGGGPRICIGMRFALLEEKMALVRLLRRYSLAKNEQTEKLLKVNSQVVLNPGAVMVQLNLREENF

SEQ ID NO: 164557 - protein, 88 aa, Heterodera glycines
QLSLKCSYGKLEFEKNSCVESSYYMRNPFEPPNFHKSHRDYSLDDFVIVGSRCFICEQHICVDEQRSLFYRHTFWLRCVWRERHTFPS

SEQ ID NO: 164558 - protein, 196 aa, Heterodera glycines
  unsure (1)..(196): unsure at all Xaa locations
TNLLLDPAIRTWVFVPIVLITFLVGIVRHYMFLLLVTKKSADLHSVPDSHCLLKARLLRENGRFLPADSFAQLRWLLCDKQHGHLVKRQDKHNTQTNPMMDPSTMTEMVQGNMLNMVPMLVICGWINWTFSSFITTRMPFPLTLRFEPMLHRGVYLQTLDTSXGSSASWYFLNVFRLLSVYALVLGSENQVYMMDE

SEQ ID NO: 164559 - protein, 129 aa, Heterodera glycines
MYGNNLFPLVKRKQTNAELEALKKLKLNSPRMKFRFRLEAFRFALYVFWPITIVWIFNSPFFQQKSEEFIQRFGRQFGITEEFIRSNSQRMKEFKQQVTEGKQREEYAKLLHEQMEFESARRFREKYGL

SEQ ID NO: 164560 - protein, 85 aa, Heterodera glycines
FLQIKNCLTTNGYLSEEEMRKKGQIMGELTKIIKEWVRGKLGIEIENSNLRIPRGIVNQNFLQYEIPLDNPASPEVKFAGISAGL

SEQ ID NO: 164561 - protein, 195 aa, Heterodera glycines
KVTIVCVGQVGMACAYSILQQNIASEITLCDVQKDKLLGEVMDLQHGVAFTRQGVVVNASIDGYSGTVGSKVFFITAGCRQREGESRLNLIKRNVEIFKGIVPELVRYSPDTIILVVSNPVDVLTYVTWKLSGLPRERVFGSGTNLDSARFRSLLSERLNIAPFNCHAYVIGEHGDSSVAVWSGMNVAGVSLSLL

SEQ ID NO: 164562 - protein, 56 aa, Heterodera glycines
ARAVVKWNSTSAVRHAISTMHAKKTTIFCFVQLCLVYFYNLQAQLKCAHQKKKKKK

SEQ ID NO: 164563 - protein, 134 aa, Heterodera glycines
IIASSLFLLVILFLLHITELFASLSSTHETNVPVIIDTPNGRLRGFESIFLHSRVSSFLGVPFAEQPIGDLRFRPPQPKRSWNGTIDAMTLSPTCYQGRDTYNESFWGSEMWNANTPISEDCLYMNIWAPVDAK

SEQ ID NO: 164564 - protein, 164 aa, Heterodera glycines
MTSTKNNSKLNELLQAGGYDASDGIDSLIPSHLKQLSRPVIRRVRMLKKIQAQSLEIESQFYKELHELEIMYQPLYDAVNAKRTAIVRGEMELTDADGELPPLVSELEPQTLEKLEENAPVEGGEPSKGIPGFWFNTLNMNASISDIIKEYDEPDPQGNLVDIT

SEQ ID NO: 164565 - protein, 208 aa, Heterodera glycines
FLMANTILQTLAFEHQKHLQLQQQQQMQQEDDGEFGAQQRKRKTSCRASIALNMEQKMRLIDYIHERPQIWDCNVEGFRSNQSRQSAFNEVAVLLSDDIETFSRIQIQEEWGKLRYCFTRIMKKLLEEGGGRTVDEGQLNTISWPYWKRMEFLLPGVRAQLAHQPTSTESECGNQEQGSPGKESNVSVTALPKVRRKRSVRKNSVAMA

SEQ ID NO: 164566 - protein, 109 aa, Heterodera glycines
PLHFSPSSELMMCGVAKTETNVQVAVVNVNSGVIGANGNGVLLAERETNSRNGADFTPNFDNTHQGNLLPSSFSACGASTPSTLLSMPFECSHDLDTNSLQALHHDDDE

SEQ ID NO: 164567 - protein, 40 aa, Heterodera glycines
FFFFFFFQFNVYPFYYKFVVNRLNGKITEHAQGMVSKIDG

SEQ ID NO: 164568 - protein, 98 aa, Heterodera glycines
NFRIRKRKFFVGRKRNTKTKKNNSFCTKRKRKHEKILLISAIIKKHKTLNCITKLKKLKSKIFWKRVKMNKSRILSKVIIRKNRSKIRRIGPDWHFQK

SEQ ID NO: 164569 - protein, 129 aa, Heterodera glycines
YVEDLSKDDQTLFEAALHQFIECTLLSKEKDPYVVIRRVRQFITGMKNYLMKIGEADLHPIIKRERSRLNIDEFLNIDAILEEVLVKILLSKLKAHLYRLMILESTSNGELRRLSENIAQVRAMSAAEL

SEQ ID NO: 164570 - protein, 70 aa, Heterodera glycines
ILTFKFFFGNFRYLGYITDPKLLVQALFSNFFMHQSSLRLDGVSLHSGWDPRRMVHQVFKKEYIRLHCIY

SEQ ID NO: 164571 - protein, 116 aa, Heterodera glycines
ILCDAKTTVFDMSASWKLVQFEFGVDFLRRVVGIVRFAVFATAPFSTNWNPFDSVGFVKQIFSRASITFRLFFLSFAEENIAKFPLQKCACPQHFGLSLRRFEGPVERFVQKWNAT

SEQ ID NO: 164572 - protein, 80 aa, Heterodera glycines
YLFFSSFLHFFVLFLPLASLRSFRLQFSLKSLSFSLRSLRLQFSLMSLSFSLRSLRLQFSLVSLCFSSSLSSSVLPNLPP

SEQ ID NO: 164573 - protein, 147 aa, Heterodera glycines
ISTSAALHRELRNLSFRNPGYRCTLPEPSRAKRTVVISAQQPKTSSEPSADRRSMRKRTAKKDGSNSDVQTRSAKSKLRYNNKGRLVLPSRTEVDLCDCLDQKCNGCQYQCKKCGGNKCSYACRVNRTTFIEHIDTLGGGRTNNPFL

SEQ ID NO: 164574 - protein, 206 aa, Heterodera glycines
SVVGARFFDEYNLFCVDKIGSCSIWESSHRPEQIITRTKERKRMAIAELESERLSFARKKRVNLSKNANPTSSHSVELTAISLHKAKKFLVTAFNNGVFCIFELPELVLLQNFRISEVRINSVDINSAGGWLAIGCGQGSESQLLVWEWQSESYLLRQQSHRQNVTVAAYSPDGALLATGAEDGKVKIWDCSSSFCTVTFSDHGTG

SEQ ID NO: 164575 - protein, 212 aa, Heterodera glycines
SPFAAPHVFSAPIVCDGPTWSFGMPSFVRPSTRFRLHFPPPPAHCPPFAADSNSFSLAIFAPAVVSPFCGIFCAWPTTANKRRRRPIRSVEQRLAKFGAGRPPPGRGCPPLSLAFGCHFLGRRRRWNWHFRPRRCQVRCRGEQQQGTAGKCIVSRPDATPSHPWHFDDIRSQCAPILAPLRSVPKMRQSRSRATHFSHILLFLAFKKLQPQT

SEQ ID NO: 164576 - protein, 34 aa, Heterodera glycines
FFFFFFFKFMSKINCYHMCFVLSKAIFNLKNTKF

SEQ ID NO: 164577 - protein, 211 aa, Heterodera glycines
  unsure (1)..(211): unsure at all Xaa locations
EEKRKSDILLNRMLPRQVADKLKLGEAVEPESFQMATIFFSDVVSFTTLAGKCTPLQVVNLLNGLYTAFDGIIDTHDCYKIETIGDGYLVCSGIPKRNGDQHAKEIAELSFAFLRTVSNFRVDHLPSERVNLRIGFHSGPAVAGVVGLTMPRYCLFGDSVNTAXRMESNGKAGKIHISSRSNRFLTSVIGGYVTEPRGEVIIKSKGVMETF

SEQ ID NO: 164578 - protein, 151 aa, Heterodera glycines
FTICNGNGLSVTDLTLIPGPEESTEPRVYIPPEPPIPIIFITLPPSEGTISFPAIQMPTKKEGEKYLEGHIKRIAALLGMTPKEAEELKEGAQRMKKWIKNEIDSCINFIFPKKAKEEAARRTAEEERRKAAFWEEYRRERAAIAKEETMD

SEQ ID NO: 164579 - protein, 201 aa, Heterodera glycines
RFSSRQHSFSLLLLFAFLVILPPVCSRYEDRYNMNMLPWDLKPVQDFIGLWQMDRSSGNFKELPPPNLIDLAINPIPKFGARTMNITHTYLDSARNVIRSDYGFMPVKNATRRDPRVHVAYLTTSSEGWSMMEQGFFKDGKLIFHLKQFLKRSFGAGSNLDIREFERQFELSGFHSMTLKVRAETSFQTEAYTAWYTKILF

SEQ ID NO: 164580 - protein, 199 aa, Heterodera glycines
MLRKTIKTLQPIYNARTAFRFQTGGYAAPGTEAQAQEVKKQTSTKYVIDEQKREKLTLFGQYVAACMPKFVQQVQFAGGDELEVLIHPTGVLPVMAFLKGHHSAQFTNFIFACGLDVPTLRTYTDEVAPIDSITPVFSGAEWYEREIYDMYGVWFNNHPDLRRILTDYGFEGHPQRKDFPLSGYVELRWDHELNRVIYE

SEQ ID NO: 164581 - protein, 83 aa, Heterodera glycines
LYRCLPSQFLLNRPSAFNVTMRQHNGVTTQLNRAEGTNKAGRELICTLEERIWKESETTNAGQSPSVDSPKSTKTRHFCQQRP

SEQ ID NO: 164582 - protein, 207 aa, Heterodera glycines
MMRLLLALAAIAASPAIGGLLDAGTVGNKFMVTYSIIPDPFHQFSFYSMPRTVSEAKKDSFSQVTSNDEDKTTVWCRKNDYRVCVLFDQQGSVAGIQVSIREAELTSKDSASFGGLSTLLTPEWRRQLFLGKDVWTATAYFVSKEVLLSGGRKMDKNTPTAPEGIFVQQVDIDNKETGRLAVSSTEAQATAAGFTEQACFYGMGKHY

SEQ ID NO: 164583 - protein, 122 aa, Heterodera glycines
TQFQFPPCNSQNNSRSVPSSPTTATSSPRRSTCSTFGKSASSTRSSSSASSSLSTRPSTTLRTTFSTESMACPSTSRPLAPCLMALERGLPRPFMTSCEQVARGYSRGLGRGFERGIVCGDS

SEQ ID NO: 164584 - protein, 36 aa, Heterodera glycines
FFFFFLKFLFVWDGRIRSFSQFLVDLFTYFVQKMAI

SEQ ID NO: 164585 - protein, 118 aa, Heterodera glycines
KAAQFVILHSFRPDLGRNKKQTKPKNNSKTAENCTPKKESEIKVSLGEGNAFFEHFQIILLDNQGRKLILFLKWNKTGKAFRAKKGREGWGAGLHENFKKNFVYENEKGHFDTKTKNK

SEQ ID NO: 164586 - protein, 96 aa, Heterodera glycines
  unsure (1)..(96): unsure at all Xaa locations
MENYPRERPIWFCESEDDTVLALHEKITGQVEEDPDHYLLHLLVSXLCSVHNVSISAELSAIAPPNACDERDEGNGSELDSAVDDDETEEDLEMED

SEQ ID NO: 164587 - protein, 80 aa, Heterodera glycines
HCAQMGICLLLLNGILGIENSESEEDKSMLWLCRCFNSKFVGPSERKRRRLLKFLFFFSHSDAFPFHSSLSFPPNFCFFT

SEQ ID NO: 164588 - protein, 205 aa, Heterodera glycines
RRRRLTIFLGYTSNLVTSGLRETFRYLLEHDQVDCVVTSAGGVEEDIIKCLRPTYLGSFKMPGNELRAGGINRAGNLLIPNSNYCAFEEWLNPILDKCLEEQRLQGTRWTPSKLIARLGSEIGDKRSICYWAWHNRIPIFCPALTDGSLGDMLYFHSVKNGGDGIVLDIVEDLRYLNTMAVRSLRTGVIILGGGVVKHHINNANL

SEQ ID NO: 164589 - protein, 196 aa, Heterodera glycines
MDISFRPHDYLVLLAIPNSFALRAASELVKMLLDTAQFGFKGVTVVRQPTLVLYSYDVTTGVVVDLGERLSIVPVIDEFVVDDAVKMAHFGAPQIREQMLKGIGDNLQKVLDIFGNGSDDDDASIQLLLRYIVEKSCYVAADGIEEERAKGIKDELVEFVGQHSLKVNGELRFMAPAGLFRPQLWGLEMPALHRMV

SEQ ID NO: 164590 - protein, 138 aa, Heterodera glycines
NFDHGVGHGVGHFLNVHEYPPYIGYRVQSKYNYLRKGVVVTIELGYYAQGSFGIRFENCYEGSGDAVSSSDSRKFAMFAPLTFVLVQKSLLVRELLDQHEIDWLNRYHNQCLEAVGRYLQEKSMQEEYNFLAEACTPF

SEQ ID NO: 164591 - protein, 119 aa, Heterodera glycines
MPSLDERFNAAVEIVQKLPKEGPLQTSNDQKLKFYSLFKQATIGNVNTSRPGMFSLVEKAKWDAWKSVEGMSAEEAKEKYIETLLEKFDDAGTQVDISDWLSKIDPSIRTNLALLGKNL

SEQ ID NO: 164592 - protein, 50 aa, Heterodera glycines
FFFFFFFLKINFLLKNELMATQNNSSVPFCFGMFCSIFCCTISLCKLFSL

SEQ ID NO: 164593 - protein, 95 aa, Heterodera glycines
VQWADLIISKTRRNSIVQQGMSNWVLNIGLVFETLSAVFLCYCPGLDKGLRMYGLRFSWWFPALPFSILIFIYDEIRRFLIRRFPGGWVERETYY

SEQ ID NO: 164594 - protein, 26 aa, Heterodera glycines
FFFFFFFFFFLKIIRIYLYKFVLYNF

SEQ ID NO: 164595 - protein, 186 aa, Heterodera glycines
MSPSTNTDLVTPNYIAEIVGVNETVAPQQQLNLLVEDALDWAHCFGLVLRTTEHKDRSDVCQAAPFALFSSPFPRNLFDEAMAVQKDLNLLYFRISWDLEFLKEAHQHVIPSDAFTRKMLEILEDVHSGGVKQHITLLTQRADYMCHVTTIDDQTETARQQQFELKQIEVNNIAVSMGGLAQRASV

SEQ ID NO: 164596 - protein, 185 aa, Heterodera glycines
RFANLGAVLYILQRLHRLHPDGFTVAQYVQFENRQKRARPTSEGFFFNNTLPSVASLLESDDDLLRVDIKEEKFYVSEEVTLTHLFCLSKNLCSNLFRLLRRCSSNNAIRVQHLLEISSQLVPIGAPMPNSNALVDLCNRFPTIFKLRCSPQDNYRFDNSVIMLNEQLLDSENLAWRVVLDTDEF

SEQ ID NO: 164597 - protein, 48 aa, Heterodera glycines
LNHGYVPITESVAPLCVLYNEIDPPSNPSDCMYIIYPLIHHLILPMSE

SEQ ID NO: 164598 - protein, 159 aa, Heterodera glycines
MAVLAEAHHLRQHQKRLEERGIVLEDQNRQLQMQLERLQMLMAKKGNALQTLPTTEEQQSHNQPGFISSTDAEDTDMEMLALAMPIREIKAIGISSGQLGTEIRRNRMDRLRETVDELNRAMENFVVFTQNCAQKEQQQDTDDSGTADNHQQTVEELER

SEQ ID NO: 164599 - protein, 210 aa, Heterodera glycines
LIAHFKPTVEQRICQMIEGVINGDMNAVLATMPLKVRINEDNLDLIGRNFGISPDQSKNSEIKISKKLQAPRNFTLLNFVSQLRDRNLVLDFSLIDDPFVSQGTVLMKSHGEISYDGLGETPFAPPNVIIPQAQGVFMAEFFGTDFVANSMLYHAFKQKYMDVVVGPESSPQLKDVLLTTCSSGFCIGEYLGSLGQQFPGRQVEIQFSAK

SEQ ID NO: 164600 - protein, 122 aa, Heterodera glycines
EEKSAGPSNNRLPGEQSKILVYGKVELCRGYLFLTKENCQLLGGQKPTQCVPTVPLRQMSVQRNASGSSLIREGLNCDDTTEWQKPESRSIGEGPNCFDTTERQKPESRSIGEGPNCFHTKE

SEQ ID NO: 164601 - protein, 161 aa, Heterodera glycines
MDKFKEKLNLLRAEADAANARADQAELQLKKVQEQLASKDNEVNSLNNKVALLQLDNERAEKRIDQVKTQNAAESDLKSQIDALNRKVSLLEKDLATAESALKVAQEKVRTLELSSEQFERKANNLEREKIELETKLDDISAKYAKTKQELEDTLKQLEEL

SEQ ID NO: 164602 - protein, 95 aa, Heterodera glycines
LLRPTVPFVSLSLFLLLFLFIAFPSTDGFGVERAVRDKRGWPWDWIGKQACKTAANCKCKDGKSWAKCVKSEGYAASNCCDKNYVWACCGKKPKH

SEQ ID NO: 164603 - protein, 73 aa, Heterodera glycines
LGPHVPNAKEKSNCVRIFMYNGKFALTCSVLFFSNCVRIFMYNGKFALTCSVLFHGVIINTIVTGLLPIIKLV

SEQ ID NO: 164604 - protein, 57 aa, Heterodera glycines
  unsure (1)..(57): unsure at all Xaa locations
NCQLLLSEIGLTTYSSHSTWFHKTVRFSRSKSSRFYMKKIXLGMFYSIRVGETVFFS

SEQ ID NO: 164605 - protein, 175 aa, Heterodera glycines
MQASKNNNCVDSNFNFFDAFDLDSQLTEEERTLRDQAHAYCQEKLQPRVTQAFREEKFDPSLLPELGRMGFLGAPYKGYGCAGTSFVGYGLLARELERVDSGYRSIVSVQTSLVIGPIVTYGSEAQKEKFLPKLASGELIGAFGLTEPDHGSNPAGMETKAEWDEQQQLYRLSGS

SEQ ID NO: 164606 - protein, 207 aa, Heterodera glycines
MSTNNHNDSYASTSIEGLTKQNNNCIQSARKFMVKMHTQDIIGIFIFFALPIGFLYAVTFPLSLSFDPFSKGWLVWVVPCSLLGLNVYLNALMMFKVGPNSQRNVLPSVVKRDFHFCHLCQSNSPPRSFHCPVCNFCVFRRDHHCSFTGSCVGHFNQRYFVAAVFNLWPVVFSCCVWNWHALLLAFSPISLSDFLKWVFPHMALLFR

SEQ ID NO: 164607 - protein, 71 aa, Heterodera glycines
DSPRPKPITQSAGTQTTPPIASTSPFSSTTTVRRRAHSLADFPPLYNFSQRPLTHIRHSSLGENSGADPNF

SEQ ID NO: 164608 - protein, 211 aa, Heterodera glycines
HPSSTAIVQHPVITWAFITRLPQHTTLVMSASQRGSTSQPSGSNGQPTPSPDRHWSSTPSLLNVLQSAVDRAATFQTTARPPPNPNSLAPPPVVVEGGSDMEPDKEEDTEHQNKGPNDDEVADSQESGGNSDDHPDDAGDTNSAGLLTQLAAALAVPGTEHFMGTLAQDLHGLPSREKDRLFAALLINIAYRQANPPPPPPAPSAIDPDLA

SEQ ID NO: 164609 - protein, 78 aa, Heterodera glycines
DEGRLAPEMISIVKRNSCGKALEIARKARDILGGNGIVDDYQVMRHMVNLESVNTYEGTHDIHALILGKAITGHQAFQ

SEQ ID NO: 164610 - protein, 83 aa, Heterodera glycines
MKYVKAHLKCDTVLETAISPNAMAALSLRKNDVRKLPMFLHRAEVHLPWTKASDGTVNSFHMIRAEMPPFFVHALKKLHLLRK

SEQ ID NO: 164611 - protein, 57 aa, Heterodera glycines
FFFFFFFFFFFFFFNITGFIQNDKCSKMDSCCSYKNFRNISQKVEIKVFGRLLHGNG

SEQ ID NO: 164612 - protein, 212 aa, Heterodera glycines
VEQKLTSVHREGLSTLENVQKQMLEERGTIYLKAAQFCAFLKKWALKPYNDSMEAYINLSIKQAEKVVSECKGEADENLHEDKLKGLRESLRLYREQKELIDNATADDSNGPNVITAENVKKFFDELCDLPVFGADIRQMFETKQKSRHEHQKEYSEKKTNVGVKLRPTKSGKVVQPEQCWNEEQRKLLKTYEKKQKEMEQLEREMENENML

SEQ ID NO: 164613 - protein, 212 aa, Heterodera glycines
SDRLPLEVALSADRFKTEVALADRLLLPLHLISSDGHSSSSAASLHRPVSRPLSVLFDCRVSSVRPFANRFEASVPSILAPFATKSPPKSSASAPKLCTDAILRVVEDGLFRQQTAAPAPGSTQNGTTSAGPPRVRRAEVEGVVQLHNANAVVAHAADLQHTQMDHPLSSTFDVFVHNSVRRRWTGGGRRSGRGSFGVLKRQSVFVVRHLLV

SEQ ID NO: 164614 - protein, 195 aa, Heterodera glycines
MLPKDLFSLYLIVDPILCGGHSHSVKLLNAVIPCGVKIVQLRAPNWHKGAILALAKDLLTITRPKGIPLIINDHVDVCLASGADGVHLGANDLPVESARELLGPDAILGYSVNNEKALEHAIRLGHKIDYLGVGPVFPTATKSDHAPPLGIERQRLICSRSIHPTVAVGGINAQNAAEVMAIGAPDALAVISAIC

SEQ ID NO: 164615 - protein, 89 aa, Heterodera glycines
KAECEICHKKFGRPWLLNGHMRTHSGDKPYSCEKCDKTFADRSNCRAHERTHGAEKPFECPRCKKAFKVKSYLTKHKKSCGKSESKFDD

SEQ ID NO: 164616 - protein, 72 aa, Heterodera glycines
FFFFFFSFIFIQFYANCKTYFDKHIFQIFLLIAAFFLFHLQPHHLSFASIMSRAIASAFTDNGRCRIMLITH

SEQ ID NO: 164617 - protein, 176 aa, Heterodera glycines
MAMIRVNLRNTLLFIIVSSFVYLAFLIWTAKDRVPQFEVQLRDVLSYVVLAVEMGGHAIVRTFMEKKQIPFSEKGQMDVGRAELLTKADLISNQLMLTLLGRFPFLKVISEEKSEFLPEKETERYRADNYELWLGLREVLSKFPSWRIPLARVTVWIDPLDATQEFTEGLTQFVTV

SEQ ID NO: 164618 - protein, 42 aa, Heterodera glycines
FFFFFFSEEISEFLFPVLIFFLFPIYRIKPIYPLKIWQGFRV

SEQ ID NO: 164619 - protein, 81 aa, Heterodera glycines
  unsure (1)..(81): unsure at all Xaa locations
QKKFPDATGDLDXLLTSLVTAXEAISSAEPQGGIXAQLNGVAGNVNVQGEDMKKYVMSLSNELMINMVKSTYAVSTLVSED

SEQ ID NO: 164620 - protein, 208 aa, Heterodera glycines
IYRETVGSRLLAHIYVHHTAEELWRPNLAWLERATHLALPRLMKRQKEMDEWALNRKRCFVGLPPNLLRHCVLHGIRPSDVQLRQLLDEQSGPNAVVDPCPPKDNRRQRYEPANLDDLLQLHGLNVEDSPAMDGALQGFVGTFLRTLLPDQEQARLDSLIQALRQRIGFDSGGGGGPSADNATAELGTENEQEQRQQQNDAQNQQQRN

SEQ ID NO: 164621 - protein, 88 aa, Heterodera glycines
  unsure (1)..(88): unsure at all Xaa locations
MSAVDLFFKQEYLQVTFRYXQRGARFALLRLSDNEPSIGLIAASAGNHALSLAYHGSGLVIPVTAEMQKFAPLMNISCCESYKDAFIL

SEQ ID NO: 164622 - protein, 114 aa, Heterodera glycines
  unsure (1)..(114): unsure at all Xaa locations
ASTITHVVFYLDGVLIDTERHYTTANERTLDKFGAKFTPXMKLKMMGHKKTEAVTVLLKDARIADRVTMDQYFAENNKRLLHIMHALSEELPGATKLIDHLYAHGVPMAICTGS

SEQ ID NO: 164623 - protein, 110 aa, Heterodera glycines
  unsure (1)..(110): unsure at all Xaa locations
MKSIAAYLLVXLGGNESPSVADVTAILASVGVDADEQLEKVVAELNGKNVEDIIAEGMTKLASVPAGGAAAAAPATGASAATGASAAPAAAPKEEEKEESDEDMGFGLFD

SEQ ID NO: 164624 - protein, 121 aa, Heterodera glycines
QGGVRCLRRCMCADGARTVSDSESNPAQRRRLSRRRIQKTAAPPSNTIIFNDVQQPTALEGEQSVRQRCQNWRCFRELGFEEIWALWVPFSSVIPWPGILLAQANILTFYCLQDSTKPQRH

SEQ ID NO: 164625 - protein, 203 aa, Heterodera glycines
AALLHFFRVALCYSVDGITFLPSRQKKLQWIPKDANDRHNWKLCVTLKAIIPSLSPLSAPSPPPMSSASSFSPTNSASENSSIRFALPINQAKQLLHCLEQLQIDGGSDGGCAGNSDPLNVHQQRLSGPLFGFKKSAFYLSVCRPSKALSGKPLVFLSEHQLLPNEFHAWHSVVNSLPLSLCCLPELRKCLRLVLEQPEATSS

SEQ ID NO: 164626 - protein, 129 aa, Heterodera glycines
  unsure (1)..(129): unsure at all Xaa locations
LSVFQLLLVWTIILGFLLPFVLAFAFGAKDTVYSVWASDGSRELTLLQAYLLASVFXXMGAALLEYHVTDTMCXGVIDLYIYXDASXELMLGQIAVSTGCGAWLLIATFXRLXVSTTDSIVGGTSGYSM

SEQ ID NO: 164627 - protein, 204 aa, Heterodera glycines
HKFDALRMVPFYDKFYDERVERCMDLYLAPRQRKMRLNVDPKQLLPNLPNPKDLQPFPTTLAFYLRGHSGQVRTLAVEPEIGELLVSGGADSTVRVWLLPSGKCLRLFEMPASVTCVAFCPNSNRTLTLVSCESDLVTVLNIQSGDRLAVSNTRQFIAGIPFGTENTAGVLWTHIHSKTMNGIRIKMNDKIRSLCWHKSGDYFA

SEQ ID NO: 164628 - protein, 79 aa, Heterodera glycines
NQPQPAVQDAGLLAANQYMHLLYGQLQRAQSQLIMTNDNLSEEFSRVVRVNAVLTRRIDLLTRSAPQHHPHNAVDALVN

SEQ ID NO: 164629 - protein, 206 aa, Heterodera glycines
REFSASPLQTIATFSVAFGHTNYLIEALIGQKRDSFATSSPTDFEVIDEDIRFLFNAEEGIEIGLDFDHKEEIFRTFPPLLSPSSKFTLKWRWVRLGIAADGRAKRTSPPAELLFRGPNGTVFHRMALPSYNSFSGTQFAQFEFGRFSGVSPGVWSVALHANNSLPIASLSFPVFPDPSLSSEWAEQRIVRLIDEFFTVRDFCSVT

SEQ ID NO: 164630 - protein, 116 aa, Heterodera glycines
LISKGDREQIYQYLFGEGVLVARKDFELPRHKDIPVSNLAVLKACQSLESRGFLKSQLSWHWFYYTLTDAGIEYLREYLHIPAEIVPATFKNDRAAASRRDRSEGDVRRPRQEGEC

SEQ ID NO: 164631 - protein, 168 aa, Heterodera glycines
MASSSEQSAGGQCHQKAGDGQTPAIDRLEGAKKDPKAVTEDEWRKVLSPEAFEVTRQSGTEAPFTGKFDKHFVAGGKYTCVCCGAALFVSEQKFNSGCGWPAFSKSIGDDQNIVRLPDNSYGRQRIEVRCAKCDAHLGHVFDDGPPADGGQRYCINSVAIDFVSGQQK

SEQ ID NO: 164632 - protein, 204 aa, Heterodera glycines
MINGIVSAEEQQNSFLSGGYSASCSTSYVQQHFQQQQQQHLAFSCRTPLQKLTPERMREYLRNREDLDCILEIYHPKVAQKSYGTEKRFFSPPPLVYLRGRGWRWRWMLLQNGNDKMLDIQNIRFSELSNEFPEPIAYIGIVGSKDQEKHKLDWQKDKDGRCAIKSLHISENDNNRKKYFTLSVYCSYKTSMPGLLQTLGVFES

SEQ ID NO: 164633 - protein, 211 aa, Heterodera glycines
  unsure (1)..(211): unsure at all Xaa locations
MSDTVGSLSEALQNEDPGIELVTFYNSEGSRISKSTRIQHLLRLPSFYIRINDTFFKFTINSFVFENIENLETLDGIKSKVFSMYSLMNMDEYKLKLEHSLMEEIENVEQRLRPLIIFRXRSAIEKECEEYTQRVFWLGFSAICFQVGVFARLTWWEYSWDIMEPITYFSTFSSVVIAMSYYIVTKQNFEYTSAHSRVLRNDFYKRSLKYG

SEQ ID NO: 164634 - protein, 45 aa, Heterodera glycines
DIGVRSIAELWNGVNCGAVKLERRTHSAQLEGGVHSIHSYDKVAM

SEQ ID NO: 164635 - protein, 35 aa, Heterodera glycines
FFFFFFFISNYLTNQSSPLTIRAVPCRYLRPTPFL

SEQ ID NO: 164636 - protein, 143 aa, Heterodera glycines
GHCLLEMPSGTGKTVSLLALVVAYMRKYPERLHKLIYCSRTIPEIEKCVEELKRLFRYYTNVTGSAPDFLALTLSARKNLCINKSVVSFRYGSAVDGACQRLTASYVRAKRRLNPNLPCCSFFEKFDEKRDMTLPKGVYNLVS

SEQ ID NO: 164637 - protein, 136 aa, Heterodera glycines
MVKFVKPGKVAVVLQGRYAGKKAVVIKNFDEGNKAHPFPHAVVAGIERYPLKVAKTMSQKKIARRSVIKPFIKVINYNHLMPTRYTLELESTKSLVTAETFKEPTQRKEAKKTVRKIFEEKYKAGKNKWFFTKLRF

SEQ ID NO: 164638 - protein, 70 aa, Heterodera glycines; identical to SEQ ID NO: 161668

SEQ ID NO: 164639 - protein, 81 aa, Heterodera glycines
ATVSLEIEHVLHNLERRKAAVNAEKTFTAILGSPQIVREPKGVVLLGGPWNYPPNTLLRPLVEVLGAGNTAGLTPAEIASN

SEQ ID NO: 164640 - protein, 209 aa, Heterodera glycines
DDENEFGALRAVQIDAALLDNTLLAFIQARIDQIVDIGGAHCLQQYKQHFRECIAPLYFLSHFLTGQSPGQRLLQIRTNFPTTFKALLNYVLCFLLPSFVAFFVKLRPFDRRIQLWYSRAQTAHRLVDFIHFCLFLAQGGPIRPTERLFGSRPVYVQKPTIGSLNFTALNRELLGHSFVQLCFLFVPLFNVFKRRFLRALSRRRQQHFR

SEQ ID NO: 164641 - protein, 41 aa, Heterodera glycines
INLLLSIFIIKYFYRLMRFIYFKLVVFLYFSLSVVQHLSCL

SEQ ID NO: 164642 - protein, 194 aa, Heterodera glycines
MARGPKKHLKRLAAPKHWMLDKMTGTWAPRPSAGPHKLRECLPLVVFLRNRLKYALTYKEVISILMQRLVKVDGKVRTDATYPAGLMDVISLEKTNEAFRLIYDAKGRFAVHRITAEEAEYKLCKIRKVKVTGKAIPVVVTHDGRTIRYPDPSIKVNDTVKIDLATGKITDFVKFESGNLALITGGRNMGRVGV

SEQ ID NO: 164643 - protein, 141 aa, Heterodera glycines
LSSGSQVDMRGDLAFKGMRNTDQWMPAAKAPYLEHYSNEFLKEQWAGLCDVVAKVYKDLGGSFPCDRVLNTLKIPVLIVNGNMDRFVLDPSLMSKKLENARIEIHAQGGHDLHIKYPRWFALKVTSFVKESAKSDVKANRK

SEQ ID NO: 164644 - protein, 60 aa, Heterodera glycines
PVPPLPPSPFPSLPSFPLGSFTPVPPVPLPPLSPEVPPLRPSPSPEVPPLRRSSSPKVPP

SEQ ID NO: 164645 - protein, 72 aa, Heterodera glycines
QPWDSSTRTATRRTCSCTSLTARRTFTADRRLGGGVSVWPWRIKLPSMGGNNQRIVVGFYVPFSSLSFIFFK

SEQ ID NO: 164646 - protein, 106 aa, Heterodera glycines
LSKCFCWQSAHIVTGSHFSQVFRLGFKLRLICKARGDPRPKIKWFKEGMEMQPKRNAHYYEKPLGKDEIWSKLEIDPATMGDQGIYACVANNQHGVMAKNFKAEYR

SEQ ID NO: 164647 - protein, 205 aa, Heterodera glycines
MSSTKDENLLDENQKSTKIQRLRNFEIQPILPSSLQTEHIELTEAVVLNVTNKSLFSALLRILPPLPAQFEHLKRVNGTELLVSVSQNGDDGTIGTAERTAIGQLIGGEPTFIGRHIPCRKPQSRHQLEMYRKIWPMSFHKNAKLEAMIDGTLLTADESARIKQLFVIVERTKGALFYDPATDQIVADGTTTAQFEAPAAAANPR

SEQ ID NO: 164648 - protein, 168 aa, Heterodera glycines
MSASFDDELQLEMQSIEAIFPNEIHIESARQISVQCASNVQLNLNIPADYPSAPPSVEICAPSVSGEQKRLLLSAMDAIVVDYREGPMLYPLIEGALEFFAEHRQKDAEEKDQSGAEEKEPYASADEETCAEFFAGPTIEDRKSKFQAYVAKVESKDQVDFLLTKSKV

SEQ ID NO: 164649 - protein, 118 aa, Heterodera glycines
MIIVVHHSVSDYASKVFRRIFDAGFEVEFDEDSPDTLNKRIRNAQLAQFNFILVIGQQEKNNGTVNVRTRDNQVRGEIAVDALIQKFQIFRDTFAQDTESAGSFEGPKEQKEILDDKK

SEQ ID NO: 164650 - protein, 92 aa, Heterodera glycines
SLLQFLSHSLSRLLLALKNLGFPREYVDAANSVLGECKIAAEKRLKRKNSRLDKCGIPEEQLWQMQQQLIEKVGKKKESGDLPMEWAQSARK

SEQ ID NO: 164651 - protein, 176 aa, Heterodera glycines
  unsure (1)..(176): unsure at all Xaa locations
YEEALSHYNLAIIKNPNDPTYFTNRALCNLNVTKWDSASDDCKIALDMDFINVKANYYLGKVYVLDGQFDEAIIVVSRAHERVLYLKQTYGDXIDPLLRLARREXVPSRRRXRMAPEIVLQSYLNQLIDDYITKKVNQLXDKREYDVEQKEEELNTQGDTFETPLNNLVVHVDDRR

SEQ ID NO: 164652 - protein, 97 aa, Heterodera glycines
AETIWHKLLRKEFLMKYMRNICCFLEEQAEQGVCVYPPRNLIFNAFNLTPFDTIRVVVIGQDPYHNLGEAHGLCFSVPNGQPIPPSLKNIFKELSSE

SEQ ID NO: 164653 - protein, 152 aa, Heterodera glycines
EDDWLSYLSLNHGHHWLIEEMPFQLDRDLRCSFGRQLRVIREREENMKRKNSTNGRRQRRQKVFSQINNGNSTTPYTEETERYPAENWKSTNSNVSNNKKKGNETSGQLSASPVNNLFEGVELPPFTDNQMNVWFKYLSCINSRIREITEDA

SEQ ID NO: 164654 - protein, 57 aa, Heterodera glycines; identical to SEQ ID NO: 127826

SEQ ID NO: 164655 - protein, 124 aa, Heterodera glycines
YVALITIGSPPQELEVVMDTGSANLWVPDTTCNSTSTQKCFKWCQISFYCSANCDEYCCGESSKVSTCDQKSKFNSAQSSTYEQKGKAFQIMYGTGFVYGFLGMDTVRLGASIDQNALTIPKAF

SEQ ID NO: 164656 - protein, 97 aa, Heterodera glycines
KTKCRTLPSFFFTFHWRTLNASIPANCSFLNSLEPVTPTLKPDKNDLPELKRSRFIRIAEYEQSLKRYVKLRVTLVAFNNALTPQCQLELMDARRWI

SEQ ID NO: 164657 - protein, 75 aa, Heterodera glycines
PKEDLETLLKKIKNSLDIWIAFLTRHDLLNKDNLPQPLNSNSLKKALHVLDTINFTAEERMAYEDRLKWLRIEAN

SEQ ID NO: 164658 - protein, 187 aa, Heterodera glycines
MEKHPFSGQFHEHAQKVVIPNIRRLIETARQLKIEVVFTVMENQTKDGRDRSLDYKLSNFFIPKGSREAKVVDQLTPLDDELVIPKTSCSLFNSTNFAYLMRNIGIDTIAVTGFLTDQCVDQTIRDGADATGGFWMIGVSDGCAAETAERHAAALNVLRGYCRMESTQSLIEAMHSEMGGESSKMGD

SEQ ID NO: 164659 - protein, 172 aa, Heterodera glycines
LSVEEYAELLLGFLVQKQPIKAKYCYTRAIEKFVRNQQLMQIWEFGDTICKQNFDKALRICNATTLGEALQPYVEELKRRLTSVQLFTMTNSYSSIGLSKFAQLVGLDESSGTVQELLQKCNWTVSEDGFISPVRNAELMQAIESLNDAKFGTGFDIKFAERGVGGATESDS

SEQ ID NO: 164660 - protein, 200 aa, Heterodera glycines
MLKLTRVFFTAIPTSSDSVNSRIFNRQWRHQQQLQLRLCSSFSTTGPPGPSFNCNGQRMDNLRDVQQKEEDTVKQQRPTVSLARSGIAKDFSGTTAELFELQRQAGHNVFGDDACFIASHMSTYAAGVADGVGGWRRYGVDPSKFSSQLMKNCADIVTSGEFLSQRPDLIISKAFSQLRSKTRPVGSSTACVLVVHDRTL

SEQ ID NO: 164661 - protein, 119 aa, Heterodera glycines
HSERQRTITSIAITDLPEGTAVNCVAIGLQSGMIRLIEMWTMTVVRDISFQSFHFPVLSLLFANESRRLYAAFANSNVVLCLQVPSLYGASSEEPMTVSRERPCFKVLNPFKCSDSFPL

SEQ ID NO: 164662 - protein, 110 aa, Heterodera glycines
  unsure (1)..(110): unsure at all Xaa locations
DADGRKVIVVYNGTGYLKCGYAGSNFPSYIFPSDVGRPLVGSPPRLVNDILIKDLMVGEECSXLRHMLYVSYPMENGIVQNWDDMGHPWDYTFGTDKLTLIQMTATLMLT

SEQ ID NO: 164663 - protein, 71 aa, Heterodera glycines
LLVLDLLHFMYFYSNKFKPIMKFVENLIVAGMPFSITYLLFSVPSAESASFSPAPLHFRLCSIWWESMCAV

SEQ ID NO: 164664 - protein, 182 aa, Heterodera glycines
EKRKQKKMKGLTNERENLQRAAKRFGEAATSALLEYSPSFRRCHQRPQSARTHSIYDFTSRDKSPTKLIKPRFSLNVGSLSAREPRPSPSFERIQSLLSPRSASVSDQLRHSVRARAGSGQSTKSSISPSPRHRSSISSAGTRFLRWIGLLSPSDEGHHRQNGKNEDRKKSTSNKRRMSSFQ

SEQ ID NO: 164665 - protein, 198 aa, Heterodera glycines
MSLIKLVVKTIDGKDSIVRVDPKMSLDHLRHAIEAATGISKNDQRLIFRGRILKDESLSLTDQGFVDGLAIHVVTNSPPASTNGSSTESRSSETSQSHQQPEVMVVPQITTQNLIVGQVVLERTSLFDNPNVALDAVTNALEEIRGAFQLETESSLNTNIQNGSFAVNVILRGMREQIVDGPARERFESLRVEVKKLA

SEQ ID NO: 164666 - protein, 68 aa, Heterodera glycines
  unsure (1)..(68): unsure at all Xaa locations
LTKGDNNMVDDRGLGAPGQQCLPRKDVISLAXGFVPYVGMGTIMVNHYSILXYTVLVLPGGFMLMSPE

SEQ ID NO: 164667 - protein, 65 aa, Heterodera glycines
FFFFFFLQLDIFNYLKNWGHNTVLKIGVYGETNLGAFENKANLTSENLASCVIPVSGGEVAPTPQ

SEQ ID NO: 164668 - protein, 100 aa, Heterodera glycines
PPKKPLTLSLLSSELVAAASADECAVEVPLLSRPGHFVVQMGLNVNLNCPRRFVVQMMNSSGHHRILLLVVLQVTVLLLELGQCGTQHVIVGRLKMIGSD

SEQ ID NO: 164669 - protein, 21 aa, Heterodera glycines
FFFFFFFYVNVRINYQVNFHS

SEQ ID NO: 164670 - protein, 122 aa, Heterodera glycines
VIRNIKREITKDITDPYAYNTTANRINNEVLSRGPLGQNDKLFDLGTMIATIEQQTGDLTEHSRFRSFVILHISTWTSKACVIPIGLSTNQFLNYSGFGYVEMYAHHLFTTNDELYKLFLFL

SEQ ID NO: 164671 - protein, 158 aa, Heterodera glycines
TTPTPCFFFFPPPPPTLYFPLGGGGGAPLFFFLRPPPPPPPSFFFRRRKEKSAVFLFVFPPPPNTPLFVFFFPAAPKKKGVFFPSFWAPQKGGGPSPPPPPLFFFFGGAPPPAGFSRLCFSRPPPFFLFSPRGPPKRGFFPPAVPPFPAGPPLFFPPP

SEQ ID NO: 164672 - protein, 88 aa, Heterodera glycines
AARPGQILWLLGLTRLQTQMRVVKAFQATVQNSHPSSLSLQAGDRLRQSYRRLRIAKEIERANELRSRGPIRIVDSETKPKSSDLKFV

SEQ ID NO: 164673 - protein, 188 aa, Heterodera glycines
NSEEAKRREIEKKLNEAIVRCCPKCRLQFVKLDACNKMTCACGTTQCYICREVGITYDHFCNHPRDLIIAKCDKCVKPKCMLWEDFKRHDREAIGRILKESGVEINIPASPMPGPSTKQQPRAIIPPMLPQRVHVALHLPPRVAPPNRMAPPPQRVAPPQHVAPPQRMAPPPQRVAPPQHVAPPQRMA

SEQ ID NO: 164674 - protein, 197 aa, Heterodera glycines
MNFYHAEAAEILNKAAKKEGSLRRFIYESKLKDKKVLLKICCEVAKHRHWLQQLACRPAVQTFLARELSCGDSSYQLVLIFELLHGKWKRKVPTNGNGQHWTALRQLKSILDEESDLLLKDGVSSESLSPAESSASLLPRYVRVNTVRMAFTQAVELLERDGWCLCRLKKRITPSKYRRLVSTLESPKIYVDPHIYD

SEQ ID NO: 164675 - protein, 166 aa, Heterodera glycines
MDYGVERKRRRLSNYGATSPTKSVQEVKPVALSWHGLTAVHAKSGRKILDDASGMADAGQLVALTGDGGVDKTALLNTLLDHNLKTLSVEGQVLINAHSLGRFITYVIGYVQQDDLFMGTPTVKEHLMAPAQLWMVGHTQRTMRRRVNELEEAISDGEARRLPFVF

SEQ ID NO: 164676 - protein, 78 aa, Heterodera glycines
IGGGLSARHGRSCRRFVRTGQENQSRLNAEKGANGDGQTANSEIFLFIFSLCIFLFVYSVRIAQLNLTLFKKKKKKKK

SEQ ID NO: 164677 - protein, 86 aa, Heterodera glycines
RTSRHGIFSCWHLLVAKVVLQHVANVRFNTPPLTPDVWPIRMPCAEPYPHSHRHILQQSSALGHPKAHSNPFGPEFCRPTPPQTLH

SEQ ID NO: 164678 - protein, 203 aa, Heterodera glycines
HALLPYDQYLHRFAAYFQQGDMESNGKCITRNGTRVRHSTGPIVWGEPGTNGQHAFYQLIHQGTRLIPCDFIATIKSHNPLRGGLHHKILLANFLAQTEALMRGKSATEVEEELRASGMSSEKIAKIVPHKVFEGNRPTNSIVLPQLTPSTLGSLIAMYEHKIFVQGVIWGINSFDQWGVELGKQLANIILDELRGGPTRKHD

SEQ ID NO: 164679 - protein, 75 aa, Heterodera glycines
  unsure (1)..(75): unsure at all Xaa locations
LPLPPRATPTHNXPRPTPTRPRLPPNAAESTTAPAALPPRQCPLRPPPCRTLPPSPRPPRLPTSCPPTCRCPRRS

SEQ ID NO: 164680 - protein, 141 aa, Heterodera glycines
  unsure (1)..(141): unsure at all Xaa locations
MKFLIQQEAIDIYRELFTSCGFCVDQLMELAEVACAQDIGETSDNANDLILSWPGNNDGDELVCARLLKDFGFSPTILCTIPSPNDLMXTIDASIGMISTFPSNESFPDPNSIETLXSVLDEIFGFIFRHPIQEPFDVILK

SEQ ID NO: 164681 - protein, 88 aa, Heterodera glycines
QHSSRKDIDKQLDIGRAERLQKSRKRPQRYIIKEQSVVRILDEADFESEEGLANALHLLGLVMQGFVEGLHIRGNDESDEETADADGN

SEQ ID NO: 164682 - protein, 189 aa, Heterodera glycines
MTTSATNSDSAKFVFTDDMKVKFLNDGYLIIPGFFSTADAAALKSRADELLHSMDLSTHPMTTFATGGKDGTKHVGDKYFLESGDKIRYFFEEDAVDKQTGKLLKPKERAINKIGHALHVLDDKYREFSHRSAVIDIVRKLDFEKPVILQSMLIFKQPEIGGAVPPHQDSTFLHTDPPSAVGFWFALED

SEQ ID NO: 164683 - protein, 47 aa, Heterodera glycines
EILRDPGMRVLLEQMSHDPDAAREHIRNPDIFRKLMKLQEAGVIQIR

SEQ ID NO: 164684 - protein, 94 aa, Heterodera glycines
GQERFRCMVPLYMRNASAAVLVYDITNRESFEQIEQWHNEVLRCPTALEEPIFVLIGNKADQHDENREVAEGEGVQKALRLNAHFFEVSSVHSE

SEQ ID NO: 164685 - protein, 127 aa, Heterodera glycines
MLRHCMLYSRAFCTVKSPPLDLTKEVITKLERLSALQMQLPQESRNLAEDIQVAERIFEVNTEGVDPLHNIVDDFINCPVREDVSEHTSINETLANARKTFEGFFVSPSVGVEYKRRGKDGNKKTDR

SEQ ID NO: 164686 - protein, 174 aa, Heterodera glycines
  unsure (1)..(174): unsure at all Xaa locations
SLLSSSPPPSLPRLPPLPRTTRPRPAPTTMPPSPRLPPSNPATTRPSPRLPLCSPGTTVTPSPPPPXRRPARLPRPLSPPCPPTTTTARRRPRPPLVPTTARRPTARRPARRRLPTKLRLPRPRRAKSRRPRRPTRTSKSRRRSPPVRTMSRSSLRASSRMPTGRCTRRRVPAR

SEQ ID NO: 164687 - protein, 138 aa, Heterodera glycines
MAKVPRNFRLLEELEKGEKGIGDGTISYGLANPEDIFLSDWNGTILGPPHTVHENRIYSLKIHCDANYPNSPPAVSFVSKVNLPCVSPTTGRVEASRLPCLSHWERNYTLETVLSEIRREMAAPNNKKLAQPPEGSTF

SEQ ID NO: 164688 - protein, 208 aa, Heterodera glycines
DFSHIKDRIVASVPGRFQRSGTDGDASCRFGHLRLRRLLSEAFSVEERQRHKAFVGQFSSIGSLGARPEAWLCDEFLTSLSCGRSMISASSLKLIYPSVENVRRSLEGYAAGLSLPYSSQTHQKQTYLKQFLHQWRSDRLKRSAASPHVKSYVALDAAGECQWLLLTSANLSHSAWGKLEKGGTQLFIRSFELGVLMCAKDHLRRQSP

SEQ ID NO: 164689 - protein, 205 aa, Heterodera glycines
  unsure (1)..(205): unsure at all Xaa locations
MAFAGDHIEELREHYPTLLQNGGSGFISSTEVQGALKLLGIDLPGYQIRELLSRHGDPKHLNCSEFEAIYMDLXSFRNAETARWKKRIGSVTGAYQVQGIAEHGAEEIVHTIRVEEEVAFANWINSSLSEDQHLKGLLPLKGGDLYGKVKDGLIICKMINLAVPETIDERALNTSVFDTYTRLENLTLALNSARAIGCAIVNIDA

SEQ ID NO: 164690 - protein, 183 aa, Heterodera glycines
LAKTLDQNHSNHSNSTRHITFSITTKMVPWWSSNPSTLNSSMESIEAAAAGEQHRHVRPVHATPPPADYFDGIVIVGQGVTADVTAAGDFVPCSTSTLAQSIERVFGNLQHQQIHPESYEEAKRLLVFAGLFFLLMCAFVLIKFQVAFDDVFRWSPAVWLVSVIICALLMNMSVQIRRFVQRI

SEQ ID NO: 164691 - protein, 72 aa, Heterodera glycines
  unsure (1)..(72): unsure at all Xaa locations
SHPICPQSCPPPSLGPRYKSPLDDFRNGPREKVLFVTCPTVAPTXVADSVATVDVNPNSATFCQVIAQVHLP

SEQ ID NO: 164692 - protein, 112 aa, Heterodera glycines; identical to SEQ ID NO: 155557
  unsure (1)..(112): unsure at all Xaa locations

SEQ ID NO: 164693 - protein, 40 aa, Heterodera glycines
EKGHLISILCLHLFKNDWPITPNVTFIDKHIKLQKKKKKK

SEQ ID NO: 164694 - protein, 89 aa, Heterodera glycines
KIFEFKAGGVAGRRAVVALPSYGGLYSTSMVRRGRGGGGPVVVVALHPLLSLPFLFLRCCCVVAFFLLLQLLLLLLQFLFLLLQLLLLL

SEQ ID NO: 164695 - protein, 35 aa, Heterodera glycines
IHRNAPTCPSCKCRSRSKNPKKPRKKAEPSELRRN

SEQ ID NO: 164696 - protein, 67 aa, Heterodera glycines
FIFYKLSLFRASLKKCPKTSFGDFNSATEEAPPTTAPVPPPMPGGLSDVKVCQEGDEKLTFCFGFYL

SEQ ID NO: 164697 - protein, 21 aa, Heterodera glycines
FFFFFFFSDGIFLFENKYIKN

SEQ ID NO: 164698 - protein, 167 aa, Heterodera glycines
TTTNSSSDCSSTATRPFVHINVNTVEYAVPSEYQFVDYLGGGNYGNVIKVRAAQGVELAVKKMYEPFSSAIKARRVFRELKLLQLISHENIIQFVDMYTPDMDDKCFKNVYIVSGYAGVSLKQVLDRQKQLGQSLINHDHIKYIVYQLLRALKYLHSANVIHRDLKP

SEQ ID NO: 164699 - protein, 146 aa, Heterodera glycines
VIQLPNCADAQRRVSLTNGFHPPPPYFVNSFPAQPSARPQPFAMSSPNPKPARGPPPSMLHKQIENILRSSRGRLPPNGHPFIVRKISIRSQVQQVVQKEQQVQVVQEDEQSHDLQKPKQSSNAKDESEDIIGQLIEQFKRLKVSD

SEQ ID NO: 164700 - protein, 76 aa, Heterodera glycines
HTFFKFIFIKSFKSVVVVVREASLNAVSVRTFKESNKLANSDLSACFHGNSSARTVHILSHHLLRLPSSFVCFNNL

SEQ ID NO: 164701 - protein, 167 aa, Heterodera glycines
  unsure (1)..(167): unsure at all Xaa locations
MVPHNSEFTRKLRAAVRAXIEEFGIDVDDELPDYVMIMVGNKKDKARMKSDLKLFLGDKTPDFVEWLFGFFQKVKNATTTSSASTQQPQKQSSTEWATDKEKKRTMDKDKGDGEGKAAEKVSSMEEKPTKHDRRERTRESEKPSSDRAKVISSSSAHSQPQRSSSHT

SEQ ID NO: 164702 - protein, 192 aa, Heterodera glycines
MSASREIIATHGKEITADDHFRSANGAKEFFKRKDRSKSYEMNNVSGVRTISWNASGTYLASGSDNRVVSVGSLDPHSCRLKQIFVGYGHEDIVEAIEFAKRDEMKMASCSSDKSVRLWDLRNPSSHTKLSTPGANLFVTWSYCDNFIIFGDKSDNLGVIDARAMKTLELFTFKDEINEFVCHPNGPLIFVA

SEQ ID NO: 164703 - protein, 148 aa, Heterodera glycines
QLQNIQQELEQSEQIRVELEQRNRENNRLAQKEIDTLRSALVDQSNELQDQSKELQDQSILLQDQSKQLQKQQNTIASLLAENDSLRNRLHIFLLFLSFVAPPVAVAMKSNSRRMSHAETASALIRCTFLCFVFWFPAVIFAISFVGV

SEQ ID NO: 164704 - protein, 203 aa, Heterodera glycines
QHHPSTSSAAIASPSMSVDVPPFKMAPSSPNSAPSSDGTFSFHQQIAASSDNANAEGPKRTQQKDGAMGKKAYGRTAEGMGLPTDGQFQSHGGGGPFFGFHHHQHPSAPPVHPSMDHHHSASVPPPFMTHLHPPPFGHQIHSSAVGGGPFNVPPPVFPMSAAASVAPNAAPSFQQQLGSHAFNVGGFSSSSDSVGGPPRPQPS

SEQ ID NO: 164705 - protein, 171 aa, Heterodera glycines
MAMANSRGGMPSINPCAFGTGQFLFCKPSTAPGAPCPGQQFCHVGDSPTTTICCNKPAAVDACQQPLFVGVGPSNLVRWFFFAPSAQCQSFTYKGLQGNENNFLSRFDCEQICQANPCAVGTPLRDQQGQIGFCSATQQNICPIGFYCHAGRDVKTSLCCPMMAGDPCSQP

SEQ ID NO: 164706 - protein, 102 aa, Heterodera glycines
SLLLSSAKPFSLPPLRHPSVPMMLFRLPQLFLQRVVLLRVFLQQLPFATFCRFVEGTRWLKCLKNNDCSNNHPSEENCTFSQNECDTVGTTILLNGLSIGKR

SEQ ID NO: 164707 - protein, 78 aa, Heterodera glycines
MQIKVKTLTGKEIEIDVNPDDKITRVKEKVEEKEGIPPPQQRLIFGGKQMADEKTLADFNVAAGSVLHLVLALRGGSN

SEQ ID NO: 164708 - protein, 199 aa, Heterodera glycines
  unsure (1)..(199): unsure at all Xaa locations
TAATGAIGDAAETATTARRRPLFELTLEESIRYAMNDPVEDWLNQTLCLNSQQSLPTSLTGTPAPDKCELYYVNRDSLFSFHKAAEVFLANLMSIYAAAHYKNSPDDLQMLADAPAHHLFVLMAPVPADQSSVPXILAVVQLCLEGSISKQSVTNVRDKGKKRAAGDLIPWTLCQHFLDDEFPTLCGARIVRVAVHPNF

SEQ ID NO: 164709 - protein, 120 aa, Heterodera glycines
ARPKGSPGRPHAPNPSASTTLSPPLVVANPSLFFSSNPSLRWILYLCRFRLPLLKFLPILQVDPCLPSSQTARRSRFSYFNAVDSVQKQVFQVAHGASLVVVCSNSHKCVPQGRPVWPRH

SEQ ID NO: 164710 - protein, 201 aa, Heterodera glycines
TSSNGEKEKEAAKSKQTVAVFPDIENAEAPIQLSRETTHSNHHILIAPDNLTLRGTKGYCQAKCNNGVTEGRWYYEVDITKMGPKDNARIGWSMISSLLTGPCGFDLFSYSYRARTGVLYHDSRPRSPPAIGDLDKFIRGYGASSRALSLHWTHATPDKSLLTGPGDVLGVEIYLPKPTEQQKSILDSRVWRPKARSSYEA

SEQ ID NO: 164711 - protein, 129 aa, Heterodera glycines
LTRPPPISHQAALPPRPQQIVALFKCSSDTSTTNSFQQWHRAPSKHRRHWPTVSAAVVRRSVPAARTLAAVRRRRMSHHPLPHPRRPHRLWTNCPQILLAKQSQQHQQMDNNNSSERPHCSITTHRCVC

SEQ ID NO: 164712 - protein, 140 aa, Heterodera glycines
MAKNAKAYVSGTKFRMALGLPVGAVMNCADNSGAKNLYVISVKGTKARLNRLPKAGPGDMVLATVKKGKPDLRKKVMPAVVVRQRKPWRRRDGVFLYFEDNAGVIVNPKGEMKGSAITGPVAKECADLWPKIASASGTVV

SEQ ID NO: 164713 - protein, 152 aa, Heterodera glycines
MAAKFQTDNGEPIELKDDYQDTDPSPKAIPTEGKSRQSPTIDFVHGSPGSHKDFKYMMLPLREKGLRSVAFNWSGMGYTLFDRRLRLTNSERTAFARSLIDQLLPSPTELIFVGHSRGGENALRLAREYPARTKALLLLNSCGCRPHKGVRP

SEQ ID NO: 164714 - protein, 114 aa, Heterodera glycines
  unsure (1)..(114): unsure at all Xaa locations
GSDDFAKLRRAADYWIILASTLKGLEDHVIINIANEWFGSSGQAARWASGYASVLPSLRAAXLTHLIIVDSPVWGQDAISITQQGRVNFEADPDPNLIFSIHMYDAAAPYAATV

SEQ ID NO: 164715 - protein, 94 aa, Heterodera glycines
TYLKIFFNINYFLNKWNFEECEWQFRYHRWNCSTPQELKEHIGPIHKKGTREAAFTYAILSAGVTHEIGRRCRLGFLRSCGCSESDNAPNRVGF

SEQ ID NO: 164716 - protein, 191 aa, Heterodera glycines
MPKSKRDRVVSLTKVKKKSREGKENILKEVRECVGQYKHLFVFSTENLRSARLAEVRQHFKQNSRIFFAKNNLMAVALGRSAQDEQANELHKVSALLRGQSGLMFTNAKAKEVQRFFDEHTEAEFAQAGAVASADISLPAGPMPAELHLHGAMEPQLRKLGMPTRLENGAIELLEAFTLCKTGDQLSADQA

SEQ ID NO: 164717 - protein, 51 aa, Heterodera glycines
FSAQQQRKMLQRSAFLNQFHVEATYALKAYAQNMMNRGIELLKSVYFWNTK

SEQ ID NO: 164718 - protein, 207 aa, Heterodera glycines
PIVFNVAPISAWRLVFSQEGQELAALSLSPPHSVALFFNYGLENLRQLKGIERGDILMDAAWHKSTSALKSTTKFFYTLSKKRRLCRHAIAYELSNEIRDEMSTPIMQSAVDEERDRMIAAAASAVEERTETLPSGNLEERSRKEIELPAPTRPFPRHLVGSGQSSGKTALGFGTANLKSLISSLKAEGGRSAGGTTDGGHKTPQSP

SEQ ID NO: 164719 - protein, 199 aa, Heterodera glycines
NLGADVLKFRYFIGYYLQSEEDKGPVLAVSKWETHSTPRCVMPPVEASTAGICRANLRDIFGFSGGREFFSDGWVLTDEMHQILMTVSGEALKFYKQKHIREEYMLKMVPFDLRRNRNDASNAEDDEEPTVTAMDELPPLTHPALPSHSPTEIAVRSNYSPVPSTGTLKLTLFLRLGHFPPELVFVVRSLRSLPIAFFV

SEQ ID NO: 164720 - protein, 64 aa, Heterodera glycines
LSDVDKDGHLDSDEFALSNYLINLKLEGHELPTELPKHLVPPSKKAMAGDASSSDNQIYPTLDE

SEQ ID NO: 164721 - protein, 99 aa, Heterodera glycines
  unsure (1)..(99): unsure at all Xaa locations
KLLQEISQTPSGRRKREKCHFWSGAISCGGKNANKKWHKHSLILTTLIEGLVVVENGETIGQQQEQELGTEKKPPVWVGTFLIWHNLWRNDXXKKKKKK

SEQ ID NO: 164722 - protein, 209 aa, Heterodera glycines
QFPDAVLLPVLGNHDSAPGNSFTDHPAKQQIYEKMFIIWKQWIGQEGKESFTRGGYYRVETSAGLFLVLNTNIYYESNPLRKELVEPEDPTSQFDFLQFELEKARQKGVPVHILGHVPPGAFEEYSVNKLEMEQIPQKYNQKLVDLLVEYAPQIGWIFFGHYHTDTFRVIKNSDGKAVQRFFTAPALTPAFQKNNPAFRVADYNTDTWE

SEQ ID NO: 164723 - protein, 154 aa, Heterodera glycines
STVLTITAICCAPVTTCTGKSFSPTSPPFRNCFYPRPYHIKALNPELFPLFDTVRAEHRERPLTFDEAQAMTFEDMQKRRLEFDLQSWHSNDEPTPLRQRVEESFGDAGGEQRREETQGKEKVSVSDALVETADKEKEGTAELAAHRPSSVLEG

SEQ ID NO: 164724 - protein, 185 aa, Heterodera glycines
MEYRMLSDDHLMVPFPSGVPIRRSLGTLGGNLTEQDRKNAPLTMAQCVSKGSFINIAQMIALVGQQSISGKRPSDGFENRSGLTPTEFFFHTMGGREGLVDTAVKTAETGYMQRRLVKCLEGQDLAVNYDNTVRTSTNEVVQFTFGDDGLDPAYMEAKDGRPLDFQPMLAQVRNITSNSTCLGQM

SEQ ID NO: 164725 - protein, 189 aa, Heterodera glycines
MSLISVQRSPSPIDEPSAVNDSDCESEGQRTGSSGQKSRTLSECFFTVRGTAVILPHHSTNESSASLAVRCCSNRTNAEGGEDSIQAHLHVMLNALRPEDSLTMVVRLQSPSLVSPSSPHVRYLAVLSTQFDATESREAALLGFHFIGPSTSTAPRSAIGIAVPISTSSTICLDGDGGIKIEEDKQPNS

SEQ ID NO: 164726 - protein, 75 aa, Heterodera glycines
SLIHPIRAPHILFFVCSVFVPMCPARLPQAHTSCRSVCYDALHDCIKILHECNFPWSPVIHCCRFPASPELRMSP

SEQ ID NO: 164727 - protein, 197 aa, Heterodera glycines
MFRIVAKRSLSTTRQWLQQPTHRPPSSALSAEPFMNATSGVYIEQMYESWQLDRGSVHRSWDAFFTNVNAGAAPGQAFQAPPSVPSLSTVPHATVVPRDMREVQPQTAGQVIPADELTRAINDHLKIQVLIRSFQTRGHNIADLDPLGINSADLDDTIPRELELDFYGFTEQDMDREFLLPPTTFIGGERATLSLRE

SEQ ID NO: 164728 - protein, 186 aa, Heterodera glycines
MDLVLIVQQYINEMVRLAGPGMKAILMDKETTSCVSCAYAQSEMMQKEIYLFERLDSVVIREPIKFLKCVVFVRPTQENVQLLSEELQSPKYSQYYIYFSNRIPKADVKILAESDEQETVRELREFFVDFVPLAPHLVSLNISTAYETQQFGISASTFRRCLQALVALALSLNKKPTIRYQKTSRD

SEQ ID NO: 164729 - protein, 91 aa, Heterodera glycines
RIGAAYVRIHCRRAAAVALLGLMNWTISSDCQRHTTIRPYLSFSNAIVMQKPPHNEGLRAKKCHLLFCCYFMYLNPFYCINANLKKKKKKK

SEQ ID NO: 164730 - protein, 125 aa, Heterodera glycines
IEELLLGQLRVIQTNMRICVHFKNGQMANFTIGEIFPRVQMANCFANGNSLSHPPAFLMAYGTRLLVNAPHSAAASDEKLVEGNVKGMRKESERAAEGTASLGRAFVPGIGSEVSDCFYSSMVPA

SEQ ID NO: 164731 - protein, 190 aa, Heterodera glycines
MMLQQQHHHRNGVTSDGIRRTYAGRASIGSTGTASGGRQHPVNGICECKHCTEALNDLHSSRGYKNAESPNSTHSEGSADSGRATGHLTSYSPFADAAAELGQQAADNLPIYEFEVPNTLVGLIIGIKGKTIKELCTRADVRMLIRPHHTQGKFDTHQLCSVEGRRDNINKCLHMIRLRFPPCRFPDLNL

SEQ ID NO: 164732 - protein, 153 aa, Heterodera glycines
WKGKRTQCQWSTFTARLRAKVVGIFNGGFPNRDFSKFVFITELRSRPVYGFCAASKKEAKKACALRLLDILMTEERLECVNLSGRKVRKMPPKPIPTKAANVEQSQQQENMHLSFSDDIDLDAIRKDFERLNPLPSAANESEVFARLRSTAFR

SEQ ID NO: 164733 - protein, 195 aa, Heterodera glycines
MSHYISAENEPKAVEASQPTNRVFINNLTSDLEEFTIYKYCTAYGEITKCQILKDSKNGMSRGFGFITYALPSSAQAILNGRPHYIGHHKIDVRPAFPTSEIVVSTMVSSSSSSYCDQSDDLPKILQSRRLLIVYNIAEATRNDLSEPAIFGYLSSFGIVKEIVQQFSTSSEEAKQNPVNEYWIVDFLDELSVER

SEQ ID NO: 164734 - protein, 89 aa, Heterodera glycines
KSGLAIGLFQGLPLPLSKCDCFVTSLRRPSIVPIARVKPKMLEKAMMATILAKAPSALAIAHSQSVSSVRLFIAAQIVMVTTRRGTMTQ

SEQ ID NO: 164735 - protein, 186 aa, Heterodera glycines
MAMHTTLARLVQTAGLTRPAWRRLTPISAAIPAGNPPSPPTSPIEPSRHISTSPRLLSGNEDGDSRYPAIAAGHGPWPFASSPAQLHLAVRPLAKSYPSHLHIQVQWGDQDAFGHLNNVSLMRYFESVRMQYLIDFSRHLPAGQRHSFAHPTPGYPGPIVANVTTRYRAQVHYPDTLTYFLRVSER

SEQ ID NO: 164736 - protein, 169 aa, Heterodera glycines
  unsure (1)..(169): unsure at all Xaa locations
MYFVGTQIQNWTSQSLDELEQLRISANAKHINRFQSVLAERPGIVSDDFLTAREETVICRIVSESGIRFVFYFKPEMWPSVRWIAFSYFKRLYLRESAMEYYPKNVRMAXYYLAAKVDDTKASIDNCGDNVRNGARTGDTETILTIEQGGTLKLKYHWTEHPPRRPLEG

SEQ ID NO: 164737 - protein, 125 aa, Heterodera glycines
YLSEREKALSVRYLHERDAMFERFSEWTEQDQTDFCKHLLQSMCDHQHGQIDQFLGPMLQRDFIALLPTGLAENVLHLLDTKSMCASEFVSRPWNRVIDHGLLWHEHIERQVSNDALWAGLSIQR

SEQ ID NO: 164738 - protein, 158 aa, Heterodera glycines
FLINSIHKITIISIFLIICSADHFLPNVFVLSLPLSLLSEAESNSQTNVHVSVHHKARSSTQGTVAVGSVIAEALSAAQVAKVAKTDKKLKFHETKSLSAASLTEPHLPVFLANACWEASQVWLAAVIWPFEWPQKANNTIKQKRRKIIGGELGKKLR

SEQ ID NO: 164739 - protein, 186 aa, Heterodera glycines
MARERIVTSKKRRHDRDSSDYVEESKRRCDEARKRQIDREDRARRRSREKREQVEKEYEYYLQIACSESKKESQKNGGQQHNFDANGGARHHRTHNQHHHSAIQGECGVVVSASPAHRLPIQDDKDGHLIYSNGDRIDNKFEIVKTLGEGTFGKVVQVKDLNNPKGPQRALKIIKNVSKYREAARL

SEQ ID NO: 164740 - protein, 190 aa, Heterodera glycines
MRGGGITQQQQTAGNHPQQQMLGCAGQPQDPKARKLIQQQLVLLLHAHKCQQIERSEPLQNRAPCTLPYCSVMKGVLDHMVDCSAGRQCQYAHCASSRQIIAHWKNCNKDDCPVCNVHINETMVVDPRQAGIMLSAVGFPSVTLAQGAIGQQQQSMNNANSGGPPQARGWHNAAATNGWQSSTANALRGQ

SEQ ID NO: 164741 - protein, 171 aa, Heterodera glycines
SAVKHYMALVDTQQYEACHQEAVTRCHATDNWHENTNKLPGQDQKVVVDPGPQVLACLYHSGFDETDPLGKECALYVRQVLRERAARVNMLPDIEENCCDALSEYCFQIVMLDNYCSPKVDIESEGKTVHSFLVHSQEKDEGKNGLHYFKTQERERKKAEKDKSVKQRQWH

SEQ ID NO: 164742 - protein, 205 aa, Heterodera glycines
DMADQTDVFGVASSSIGKPIRVELGTGSRKTIISGNLLTTDPESGSIVLVEKRQQNKTSDQGKCSQRFILIPGSSVHSAKLVTINEGTIGTVKKDGQLEEGTKSNAELREKADGIESGDEATIESHGKRTLSETVRIFDEFALSRRLCLIDALNKYGIKFSEKPHVLVQNIDNGQTEGQMPSTVISLQSGGIKIYPPYGKNDIIG

SEQ ID NO: 164743 - protein, 36 aa, Heterodera glycines
FFFFFFFGNQNLKVIKNITESYTSPIINFVWSILCV

SEQ ID NO: 164744 - protein, 134 aa, Heterodera glycines
EVDLDLDNKDYKKTLKVTWLAKRAENFAVKTVRFDHLISTPIIGKEEDWKEFVNRDSEHFGTLLAEPALQKVNCGDILQIQRKSFYICDAKTANSMTLIEIPDGRETKNAAQKGPEGKETKKEGKETKKAKIVN

SEQ ID NO: 164745 - protein, 110 aa, Heterodera glycines
  unsure (1)..(110): unsure at all Xaa locations
FFFLLILTLPVLAGAITLLLVDRNFNGNFFDRTGGGNPLVFQHLFXFFGHPEVYVLILPAFGLVRLTIQFYTGKKILFGYLGIIYAIISIGFIGCLVXAHHIFVVGIDID

SEQ ID NO: 164746 - protein, 168 aa, Heterodera glycines
MATTSSENDQPQTSALLAPALTRGNPFGLSTLKINRRRQEGNPVLKYIRNVPYEWSSDVKCDFECSGNCGLLYLALKYHKLHCGYIETRFTDLRAYPVKVLLAYVNVEDPSFLLRDLNMFCYRMDVSLVLCYSVEEAAEFIETFKFTENRSAESELARIQQNKLQRQQ

SEQ ID NO: 164747 - protein, 58 aa, Heterodera glycines
NKKKQRLNALNSFFLLPFHPAVLLLFLDCLTWFPDEILSGSLGSFSISSSSISPCRCG

SEQ ID NO: 164748 - protein, 55 aa, Heterodera glycines
PPKKIKKRARSARHEAAKRPNVLKKLKDGREAPVLRPRSGRMSPKKLKTGAIFPS

SEQ ID NO: 164749 - protein, 193 aa, Heterodera glycines
IMEPRPALTTVKSGIAGGASVETASGVAIGSVIPRIECWWPAFTSTTDGEMEAIPVTGASAALASEAEMTARLALEIEVKKPSRIACAVLDARSAKRFPRGSAAAELAPAEAGSRLVDDGCEVPGLCNAAALFMTQDVRSPRTSAAVNDGPKAHSKGDVARKVCSSKRRRGIIFRRRNAFSRRCHSWSYLCLT

SEQ ID NO: 164750 - protein, 121 aa, Heterodera glycines
INPTEIVTPTARRVFIGGWQNAHRFHQIFAIIAVRLKHLQSLLVIQHCVRSFFGRENDCIAELQSFLKSNNLCIFHAIWIFADKKSPWHCEEWRVFVPKYEMHNVSLQRRRDNDTIVNRRT

SEQ ID NO: 164751 - protein, 188 aa, Heterodera glycines
MVDHPRRIFKQICICADILLDCFRLLAPAKVGLALALVSDRFDVLADTHFRSRKWPIGNLGICRGKNGAAIHNQKGGEGRTAAVKRLLPIPQVPLPNGVVGFGRIGLGYIDGTVIAFLRRIRRLFHTNGVTLELSFSSVEGRSCDAFASSIWPLLNAAAIVEMRFKVNNNLGYLRSRLSPSILRDCAN

SEQ ID NO: 164752 - protein, 95 aa, Heterodera glycines
IENETAPDDYAASSADLRHRLACGLAEGTEMVHQIPLNMNGDITGLISFEKGCYIAQELVAHTHLTAIVRRRLMPFRPIDDKNGRPDFPRRISAG

SEQ ID NO: 164753 - protein, 197 aa, Heterodera glycines
MDAPQPQALAEPQPSRDNPPALALGSSPQVRTSAVQSMSPVGRIDPASSPLFASNLPVHPIPSPKMPSSTARCHVSRRPRLAVLAGLALAVIAVISVQSPRLAVAVAAPNPQRRDGGILDRILPNRDGGGNDDSSSTPTTPLPPPSGNRNGGRNANDDDIGILPIVGGNQSENENADNNNGGGSSNNNNGNGGGRNS

SEQ ID NO: 164754 - protein, 193 aa, Heterodera glycines
MATERDNQVYMAKLSEQAERYDEMVNFMKEVAKLGVELTVEERNLLSVAYKNVIGARRASWRIVSSIEQKEENKGNSAQVDKIKAYRQKIEAELSDVCSDILAVLDQYLIPSAEAGESKVFYYKMKGDYHRYLAEFAAGDKRKEAASSAHDAYKHATDIAQTELAPTHPIRLGLALNFSVFYYEILNSPDRAC

SEQ ID NO: 164755 - protein, 147 aa, Heterodera glycines
MQNCCPPLCHRASQKCWHRISHHRHFTLRRAAIDQLLKANERRFILSDDHQQSVLRVDVAQVAANRPIEDFYSASKCLYSNAFLFGIFDGHGGAACARHVCTRLFDYICCSALDKHRVVQIPVGEQIQWLGANAPHSLPQEKDDAHL

SEQ ID NO: 164756 - protein, 189 aa, Heterodera glycines
KAWSFMNDGLRTDMFLRYTPETIACACIQLAVRTVDQPIVLPTEPFAWFELFDASDRDVRAISQTIWELYTRKKAPNLKWVSDHLEQLYQKAVVEPEKARKEKTMVEMRDIKEQILQRKSAMLFGAGKTVADDRSPPKRRRRDMAGQNVAETKRRRDRTPPRQNVAETKRRRDKTSPRQNVAEKKYSKN

SEQ ID NO: 164757 - protein, 184 aa, Heterodera glycines
LFCTIFESMSSLFDSTWEGHLQHIKFWRSEVKRSLGESISNVQLVKGADGTMAVVGLATAPGDSAHVQMVMQAELPDISLGYDFEQDETKQRPTLELQPLFSHKTEAEHSTDASPRKIPPELALHYERMRGQMVDGVDDFKLHEKSGAVLFTTAKEISIFKGGEIKNIAQWRPSSAVLNVSFCE

SEQ ID NO: 164758 - protein, 84 aa, Heterodera glycines
KAKSKDGGRLLREQLHMYGVELALGRRKQSPLSCFSSLVEQEAVQLATDFRTICQRDYPIQAVATHSLAGVNNGQDAYIPRMEL

SEQ ID NO: 164759 - protein, 51 aa, Heterodera glycines; identical to SEQ ID NO: 146846

SEQ ID NO: 164760 - protein, 175 aa, Heterodera glycines
HLSSVLFLPLLLLLSKFTPSSVATELTFELPDNANQCFYEEIKKDVDCSLEFQVVTGGQYDVDVVLEDPNGKVLYKEARKQLDTHTYKTEANGTYKVCFSNEFSTFSHKVVYLDWQVGPDEQHKMMPIPRAGGAQATQMERSAETISDRLQIVDDYQTHHPLREATSRKRAEDLN

SEQ ID NO: 164761 - protein, 193 aa, Heterodera glycines
MAKKGGGNAAEVPDSLDEINLRINHTADESLESTRRMLAYCEESKEAGIKTLVMLDDQGEQLERVEGNLDQINTDMKEAEEHLKGMEKCCGLCVLPCLKGNDFEKNSEYAKTWKKDDDGGVISDQPRITVGDSGMGPQGGYITRITSDAREEEMDENIQQVSTMVGNLRNMAIDMSTEVSNQNRQLSRIQEKA

SEQ ID NO: 164762 - protein, 117 aa, Heterodera glycines
DPSVKGMITFPQDEEGSPVTVHGEISGLEPGLLGFHGHAYGDLSNGCTCAGPHFDPTNKTHGGPHDQIRHVGDLGKVHAGPEGIGKLTFSDHLISLCGANNIVGRALVEQQSERQFG

SEQ ID NO: 164763 - protein, 72 aa, Heterodera glycines
  unsure (1)..(72): unsure at all Xaa locations
LLLDMNGKQVHQMIPARQRRKMNRGLCLQPNSWLDLLRNAXLNCPQLMIAECGKTHLRDMIVLPEMVGCVGV

SEQ ID NO: 164764 - protein, 133 aa, Heterodera glycines
MGATESVEHSKSDLQQLKGDIFVNGRPLPDQIRQRIVALAMDGMHPRDISRNLLVSSGCVSKILASCGTIDGRSGPQMLSQEIVEKITLYKTEYPSIFAWEIRDRLKQDSLCTAETLPSISSINTVLRSHAIL

SEQ ID NO: 164765 - protein, 68 aa, Heterodera glycines
  unsure (1)..(68): unsure at all Xaa locations
FFFLKIFFXKCINLLSTVKKSDDKQNEYPKRNKRSSFLFIQILFGFFAGNSSLTTDGQSTPSSSKTIS

SEQ ID NO: 164766 - protein, 85 aa, Heterodera glycines
FFFFFFLFCHIVFLKQINKERNYNWETIKSSKTLSLQWLTDVLLHSLHSKIHRFYAFCHRFSVVIATIHHVKEIRDKRARPTIFL

SEQ ID NO: 164767 - protein, 195 aa, Heterodera glycines
MEDVDRMIVDHLVNDLRCSFADKVLKLADFDSAHIVEGIIRCIWRCRPESVATFPSFQLPNNPIERFRLASKISREVQAIGVRDHQIGYQALLYPNVFDSRHIFLALFEHFPKETVKPTDEKPLSPIEKLRAEVGVVIADQLKGEWTPEFCRFYDLQRIGRLWFPSGRKAEEEKQHSSDVWTTVICTGQQPKDGQ

SEQ ID NO: 164768 - protein, 172 aa, Heterodera glycines
GDLLANSVKDVMETLAMVDYPYPATFLAPLPGWPVKEACKAYSTRLGSQHGLAMAAHAMLNLFYNYTGQQKDLCLCGNDCPGTFSELGDPDGWPWQSCTEMVMPMSSHGPPTDPFSASCPYHVRDSFRWCQDHFAKLGFRTELFRPLWGMINYGTEYPTATYIVFSHGWLDP

SEQ ID NO: 164769 - protein, 202 aa, Heterodera glycines
MSLVARFLRPSNGWIFSSVFRQQQLLLLIARPYASDAIASDGGNEKGRNGRHSSAEDTHPSSAPAADTQHGQGWISRILTGPAGAEGLKQSHSSMLSVGDSIYELQTHDAVGGDRDKYLGAYKKYAQEVSAATPGATLFGSWHVLFGNQDQVVNLWRYQNGYPDLDSHIRALSSNTSVKSAELDYARLCRRRRTVITKPFSY

SEQ ID NO: 164770 - protein, 104 aa, Heterodera glycines
  unsure (1)..(104): unsure at all Xaa locations
THMVLGIAFVCSLMAMIATVGCLPSLCAERTPLNSKLRCGVEVFPVNTESDXTVLTDXEGSLTTSANPRXIPWKSVCRRERALGGHWERDGLQEPSGPNWPPGA

SEQ ID NO: 164771 - protein, 140 aa, Heterodera glycines
QEADEEEENGESQEKHLDSVLYDEGAFLVLPSGARIGHRSLVRYFRQRLGYGLGDGGSGDWNSKQQQRQLMHNAKQSRILKQLGGPAVGGGCCSVAVLEASVKARARDVSFMKRTVARYQLRRALASNKLFKSRGRNDQQ

SEQ ID NO: 164772 - protein, 200 aa, Heterodera glycines
MEKKIVYLKLFQIVFTLTIIWQLLSLRQFCGTFADPKGFLNETVRHCKGYSLIGKDSKTGKYSSMFNKLFTQFFMSSPTAEQRHQFMDEMAAKLPPAGRHCIPIMITPFDWFFDWVRLYRNPLNNDTLFLFSKLFFNALVSLGCLCIVIMEMLRSVEEYESSGILLAFASVLFWGHSVAFSFNLLFFWSHFWTCFNFRAD

SEQ ID NO: 164773 - protein, 109 aa, Heterodera glycines
MGCSVSVCCCCCWPCCCCCGCWGCPSAAPSVVFAAFSSPSLGKSAGGPGGNPAPDFSNFPISSSSVGVFFAFCSSPGTGGSSKPGEEGKNSLANDGFWALAKKTQKNAS

SEQ ID NO: 164774 - protein, 203 aa, Heterodera glycines
MTYRDGDRPQRKTWVQKQTEANKSTPTLNLSSSGNGGPSVEGRTRDTHLSGDELADNSPQKGQQQILNQTFTKSSTKEYDSATLIAPVSNGTESLNNRSGGLVLEDVCDSNSEMTPEMQAKRRAILASQIRRKERIMARSEEKETEEMDRLQVKMQRMEQAEMRRMEREQRRQKLLEDYKKKKVEQEFMLKPGSDRACVSSTI

SEQ ID NO: 164775 - protein, 166 aa, Heterodera glycines
NTKSQLMSGQSAQKDGKIAATILIDPVTQKSANITIRTPAQQLRMEQIEVPYKVRPFAFDSPRSAQQKHSLAQLVHPFASIPPPMDRLKGQRELFEDLSTGPPSLQWYTGGGKKGGQTPPIWGGCKKSAPPPQKKKGAPPGEGWKVPPKEKYLGLKKPRWFPNFFF

SEQ ID NO: 164776 - protein, 205 aa, Heterodera glycines
NPSLVNYSLFPREEHSHEVVQTSGEAIMAFPPEQIEQAIEDGRSSNSEVLLAALQDVQKYMKEMGHAASPHEAVGTTSSMQSPTMDTPPPLSAEDAQPMDTSEELGKEKPKKRLKVELTPPRETKPHPRMSLNSRLSNHTGDEVVDNESHSPAVATPPVPKSKKRTAASLKQNDSGNNKSLSTLIEAAKMMEGGSSSEEHHQDGV

SEQ ID NO: 164777 - protein, 175 aa, Heterodera glycines
FRVTERMANYYGVNLLPCLTGNCVDPSLFWSASPPLSSAPSRPSTSASIKREPPSNVPSPAHSVDTTARKPIGGGQLKPADDIPQFTHFCGQKIESVLSAYSDLLESLKEPPLSPPFTVGQFVLFRHDKLGMCHGTVVRQDSQHLVVKHLVTQDAHYVKMEAIFAFPHQLLKECS

SEQ ID NO: 164778 - protein, 96 aa, Heterodera glycines
GIGELYRSMFVSAQVKLLQRYVPELRPEDVERGLAGIRAQAMDAEGNLVDDFVFDSGEGPLAKRMLHVRNAPSPGATSSMAIAQMIVEKSTEKFGI

SEQ ID NO: 164779 - protein, 205 aa, Heterodera glycines
MRGSVASIDLNTFFEVDRICSWILSNKFQRTALQLPDELLEHSFHLVEAVEHRVESAGTWEEQRGRLYVLADTSYRSCCLDEIAAEHVACDSIVHFGDACLSARSSSIPALYIFCRHPFELEKFVEQFRIEFSEFGTEKQWDDCLLLCEAAYTHIQNSLGSAISRILPPSVRLFNFEVSEPNSPSSSILGRQVPVGFVIDQCSEK

SEQ ID NO: 164780 - protein, 62 aa, Heterodera glycines
FFFFFYKVHIYYICDQISKIAKTKSGGNNSQKFKKIYFLRKSKFLINGGEWHTNVAQNKMFI

SEQ ID NO: 164781 - protein, 196 aa, Heterodera glycines
YSFYINDILLQKSDMGDDLVFAVRGSFGYSLQCGIKSPTEVINENLDPKDSSCRCFTFSNNGVYFAYCNSNSTTIVESSTGRKCFSADLGKTQCIIFSPKDSFMVTYEPYVIYGSRKNSDGSLKTPNPNLRFWSVPNGELLATVVADKQAVWKPYFSADESLMLRVLGSEVHFFKNGNFAKAAHKVVVKDIASFSI

SEQ ID NO: 164782 - protein, 217 aa, Heterodera glycines
VLQPSPSSSSSTGSTLGQQRLIDRCAHRAQHKQRRNHSATAFDSSSLWHRLGSALSGQNETRGGGTPPFVSGLPVRQVRYDHVHRRGALFCRTGSWLEMVGEPGERIEVRGTRRENSKFTLLEFLAVAFGLVSIRSVTNRHFLCMDSSGQLYAAPASRYSADCVFMEEMMHNYYNLYSSCVYGSARSPWFVALRRNGQQRQRRHSRRREKSSPFVIV

SEQ ID NO: 164783 - protein, 192 aa, Heterodera glycines
LRYFFTMNDSWIKKYLSSPLQSTSFSSSVQTSSSFTQFDKINVQNLSFTPLSVPLPSPLQNVQHLGLTPLSRNASIHREKNRKRPFSPLENDLGSVCSIAKIKSPKTPRHAVKILKKIDYEDRASCYLVQWNCGSAEEKGPSTTWEWANKLSPNCRKLAKVFEQSIAKDAKKAWEFTDYEVEAILDRTVQGE

SEQ ID NO: 164784 - protein, 188 aa, Heterodera glycines
MEKAIFISADCWLEVFDLLPPFQLGLGIAMISRQFDYYVDEHFKTRKWKLGKMKIRRKIGQNGANEMKIVNSDGKELPIPQNPLPNKVIGFRAIQIIFIDQNVITFLGRFDRFFASCTTMLFITTGNVRVSEFVLHNIWPMFKDTIRLMDLNSIAFRQMRQLAPSMLNDCPSLRFFNFYDGISLEFPP

SEQ ID NO: 164785 - protein, 207 aa, Heterodera glycines
NIVDSLGEPQLLDDLSDHWTSDNHVVERDNVIMALQDLAAKYRVRVSIVSGDVHCAGAGEVGPQMGIAVTRDQVPAFMTQVISSAVGNVSPPWFVIKGLHMVSKQRPIGGSDSLVERMINVFHKDVNGRNIDRDEQSLMGRRNWMSVLPEGAGASDESKTLAFTLHMEKKVGDLKGETVDYTIRVPHVVGKLRPRMAELQEPVGEMH

SEQ ID NO: 164786 - protein, 55 aa, Heterodera glycines
RHYPAEARTSILGHRRRRRRRWRHLNRQERQSILLLHHRCRFLRQQRCVAERGEV

SEQ ID NO: 164787 - protein, 146 aa, Heterodera glycines
  unsure (1)..(146): unsure at all Xaa locations
ERXEKEXRRGDEERQXXRHEXEGXRPAXXRXXXXTTGGTQPXEGGGXPRIFFLGGGAMARHSPIYDPDLENGKSPLIKDESDGKTLRVRFDGAQYRPEEVTGKTGDNRLVVHAKHEEKTPSRTGYREDNREGMLPRGTNPGTEQLN

SEQ ID NO: 164788 - protein, 79 aa, Heterodera glycines
MSSISSGVDLTTKYQRLAVEYVKVRNQVAVLKSALVEEQSKRADLGKEMAQRETKLFKLEGERDSLLFRNEQLLKRVEG

SEQ ID NO: 164789 - protein, 169 aa, Heterodera glycines
  unsure (1)..(169): unsure at all Xaa locations
MSTVSMLLLALFWEWTMPIFGAQHSVAILLLTFLMALVSATSNVLFLPFMATFHPNYLTAYFVGMSFSSLVXFLLKLIQGVGNYDCVPNGTANSTLVAVYMEPLFHIRLYNMAMFAWMCAATASFAFLYWNGRRKAKRTTTAGAKDQQPAEGEEDTEEGGSDNGTTGDG

SEQ ID NO: 164790 - protein, 131 aa, Heterodera glycines
YKQEKDDKRVKNLDKMLVEYEVERAKKEENFRAQLFSENANFEEIPLPLGAPGAMDAAKTPFSLPLPTGITPGDVPLPSGVQLFAAMRASILKKTGATAPSQKRHKHPPGPPPGLPPPLAVAASSDNDGED

SEQ ID NO: 164791 - protein, 175 aa, Heterodera glycines
MGKHKKPFIDRKSAVNYSLHNKHLEEAQRTSNRKSVANFRPFDKHFEDFYEGYANEAEEDGAEEMHDGEGQIETDPALFSSLLADGQSQRCGEERFQRELPDPELKSAVLRYVKAMEIGKGRAEPTEDILVDNAKRNRWDCESILSIHSNIYNHPTEIREPMKVIGRRRGGTTTN

SEQ ID NO: 164792 - protein, 100 aa, Heterodera glycines
RISVAPPPMAMGTMPATTAPPSKVCPILPKRWHLCTNLAHCSSSARSALTISPRHCNSFTIQLYFSIARQIRCSTICSPKFCITVATNLTGPPCTTVCTS

SEQ ID NO: 164793 - protein, 201 aa, Heterodera glycines
MGRAQFEYDEVGNTFYYVIVSFFAVILFPLTHFLWPSLPKRTEVLKRGCRCEGDLVKRFRKEHIKPWEKAKCVIKGFVLLILWALFILLAYKVSQLEQTFEEYDPYKILQLDVDADVGEIKKKYRELSKQHHPDKGGDPVTFDGIVKAYKALTDEESRENWRLYGNPDGPKATTFGIALPKWIVSEQYGGWVLGLNVFIFL

SEQ ID NO: 164794 - protein, 49 aa, Heterodera glycines
NLKDLKPDNILVTVRNQVRIADFGLACIYFPDDAERTYEHQVVNRKLIR

SEQ ID NO: 164795 - protein, 74 aa, Heterodera glycines
ILIIYSSQFDVSFLKFDSICLLNLYTYTSSHVFLQTLNHSPDCPLSNSDRSWFLIRVLCLDFVLCCAFCFMLKP

SEQ ID NO: 164796 - protein, 80 aa, Heterodera glycines
GIIFPKTNFSNFVLIVQNRFMHAITQNHNINGGQSNLTNCKNIKLVVKAFLEGFLSGWLKINTGTYFDQCKTPKANLNKC

SEQ ID NO: 164797 - protein, 95 aa, Heterodera glycines
VKKNLSATFVLQKNFLTKFQAKKNGSLKIYSKMFYMPCSKVRHSSNNKCSLLANPLVDKLGTLITLPLSETIEFESGFDGSSSATSTTASVFLVE

SEQ ID NO: 164798 - protein, 187 aa, Heterodera glycines
  unsure (1)..(187): unsure at all Xaa locations
MTVPRSNRAVLLAAVVFVTIFLGLAHFHLKTPSESTAAVKSGVDEPAPFVPEKEAAAAVPTFVPXEDEEIGATPAVEVVAETPKPEEHHHAVTPDKPEADPAEEPSDPEEIAEAEEQAANASPTPAAAASPAAEPEKEPDHDHDHDQQHEEAHDHEHEHEHDPESEEEFIPETEVEETPETPAIPEA

SEQ ID NO: 164799 - protein, 96 aa, Heterodera glycines
LMDWRSVVDRYADLNASVFHDESIFLDLIDNMPTDAWQSGLATLLCMCFICAVFMGHDWRTVLMAGTTIGSIIVGTLGTLSWIGATMDPVMMVRLT

SEQ ID NO: 164800 - protein, 182 aa, Heterodera glycines
NLDSTEHQRACLYNKVTTENGKFTKRMWISKNSQFALSFQENAKSVESCGHTLKLSDQGFAVPSWQFRIITGKTTHRIKREQWWPKEKPLDQNEKSSTAAAQLTARAIYQNKETKELFQKMVNLICGILQNANPKQDLSHLNPTQLMREKTGTELVKAKWISPNVLEWWPCSYANTTFIPSP

SEQ ID NO: 164801 - protein, 108 aa, Heterodera glycines
QQMEPAHCHVFSWELNSRTPLCYRFNLGISRSVFSNCELNSTNIKVNRAGWLENFRPTNGTVLARFGKIPCNISFIFLVCLLRRICQMYLQLKVLGKTHFGWAVRMAR

SEQ ID NO: 164802 - protein, 135 aa, Heterodera glycines
  unsure (1)..(135): unsure at all Xaa locations
CPAHLGPFAEHHHFHGCDCCHRHHHRFGQSXGSVRHEQRRQQPHEHSXHQHYHHHQHWLATFLVKPVDPNGFVGRSEWLCRSIRMALSVDQNGSVGRSEWLCRSIRMALSVDQIGFDASLVHAALLQHVSQFVDL

SEQ ID NO: 164803 - protein, 159 aa, Heterodera glycines
YGRISKLYVECFNEREKCLTVIGGGKMATALVHGLVSAGFIDKSEVNICSRSKETAFRWTTQGYQNAYTNDEFYSKVKKPRGIVIVAVKPQIFPGFLDELRKNGWLNFVGPEVLCVSIMAGIALDTFKQQLKLVGFNGHAARFMPNVNCLVSAGIVLVC

SEQ ID NO: 164804 - protein, 208 aa, Heterodera glycines
CCASLDGVFAFAMADKKFLYLGRDPIGVRPLFYGFAGQALLIGSEVKSIEKLCRRVNFFPPGFCAQIPLGSTFSTDNQQIAFQQFFQIPSIVNYSISAFDAKAIIRKLLVEAVEKRLMDNRQFGFMLSGGLDSSLIAALATRFLHSNDFCASPIAFSVGFEDSPDLVNARKVAEYLGICHRVLVISARECVEAIPEVVFSLETFDPLV

SEQ ID NO: 164805 - protein, 89 aa, Heterodera glycines
SFTNHFVHHQSITDSSSDPPLVDEFLEFVALSGQSHLPWTLIQPVIVWKLQVISTCNSVLPSLCHFDFCLSLTLSLVFYNSLVSSIHSS

SEQ ID NO: 164806 - protein, 171 aa, Heterodera glycines
  unsure (1)..(171): unsure at all Xaa locations
QSQTHRFTHYNFELLQLPSVRKLPDHWCSIAYFELDTQSGELFKVPWQIKEVAIDGGMDPSGALSARFCLGALANVHRXSERARMHIGKGVSLKFADNCEAVFLKCLSQKSVFVRRGDSIVHKICPGVERKVFDLRWAYVEMCRRRENAQLSAIAHAYAVAGFPSQMPSSS

SEQ ID NO: 164807 - protein, 144 aa, Heterodera glycines
PLRFVRSHSDTFGGSSTHLAMTDPISAAKYKINYFLLPNFIIHSIGLSSLWALWYYLRFTNVFPYHHRVFYCRDVDLFKPFFAPEDFELFVSYPLLYVLGFTIPPIIMLGGELMFWLFSTKPRKGVYATCGECKIALITPRLFR

SEQ ID NO: 164808 - protein, 64 aa, Heterodera glycines
RAQLSESVGYITHIFLTTIAMMYLLLQNVMDIIFHVLSRFSVAHLRYTKGTQIHTTHILKRTSI

SEQ ID NO: 164809 - protein, 175 aa, Heterodera glycines
TTLALSREKIKNAIQADAYDNFHAIYLLLLERLRGHPLSRSHSASSHANHPLVNSPSATSLPSPTAPHAQAVLASPTTKAAPAVVLTESAGGGDSGEQRPPIIRGVTIRRQSDGIAIVGGAVPCHCYCCSAARAHPMLQSIQPQYAPLGIMTRFAQHPQTRRDSDGIAMQFAYQM

SEQ ID NO: 164810 - protein, 113 aa, Heterodera glycines
HSDQQHLANCNQFCHFSKEHFFNAQGLGHPFGVFVLLLPRRADDNFLRPQMLAEAARVDELVSTRFPLFNHRTNRTENFAQFCRDFCQLNEPMRRFAVREIKIIKLNLKIKIF

SEQ ID NO: 164811 - protein, 203 aa, Heterodera glycines
SNQCTFLWLMSHSRKTGSRATSQERDEEINITIIDRNFWNGKTSVKVPDLERAHIEVLRLEEAVNRSFRIVNRRAYANTRALNKMAGEVNTNMGILNAKIDTLAEIVKPKITPNQTSHVRFNSCNNANLSQDNEEYLDPFAEDSFELGRVNTLTGMIGHLEVFGEDSVIAFDEWAERFTDYVGAVGRNWNEDEKVARFKMSLI

SEQ ID NO: 164812 - protein, 78 aa, Heterodera glycines
MEVAEKIAKIWKQNGIEDVHFVSYDVLLSYPNFSSPNHLSVLSANGQVNFRTDGVSPELMAPNSEDLRSSIQWVAYSA

SEQ ID NO: 164813 - protein, 122 aa, Heterodera glycines
  unsure (1)..(122): unsure at all Xaa locations
GTIGMCACHDGVYAPEQYYLPRAIRDIPPLYDKEYADPMYSDFPLKPLCLPPVHGMNKRLVYCLAEYEPLLYSADMTFDXWIPMVKDIRKSNSAYYGFVVLHGTDSLAYTACALSCMMENLA

SEQ ID NO: 164814 - protein, 181 aa, Heterodera glycines
IHLKSDQSEMISCDLERETLTQMALFRARSDKTPTHAGIPAPDEVREGGCGQNRTNPAAPRGKAVAIQRQNGITIPINACAQSGLVRTQRVQQWSAVEESALKDVVVRNTDDRGLINWAKGVLPEWQRLCQLNPTMYMARSSPSLSNKWASLRRTHVGPGCPSKEGSGPSQDLSDVKIQPA

SEQ ID NO: 164815 - protein, 127 aa, Heterodera glycines
RVPVHAVLRHFCAVPFPRWTQLNGGLGQRDHLLLVPLFSLLLLRFVRPLVSSSHPPVDHFAHSSPFLSAAALCLFGPKIRFLLLFVPWPPLLFILCTRKQLLVHPFLLQNCAQHLLLALHSNKCRGH

SEQ ID NO: 164816 - protein, 109 aa, Heterodera glycines
  unsure (1)..(109): unsure at all Xaa locations
HYHENYLSLLYLSIRMLFRSIELLQACWISRCLQTHDYDFYDWGVFMDLIGGNAWSDSGNFPRLTFCDIDVRIVGAMQRHTVQCILEINILTXNAFLLMWHRYSLLLMI

SEQ ID NO: 164817 - protein, 97 aa, Heterodera glycines
DCPPPCPISCLILVLVVLITTVRRRRTAVADRNVVLSLLLLFSATRRRRTFLGQQCGAFLFLRIQKRTAENELRILKKFAITGYGKTVFTGKKHSFF

SEQ ID NO: 164818 - protein, 140 aa, Heterodera glycines
MSWPTQTTTVSNGSTRTFRPPLTHRPKAAQPMPTTPRPYFSQTTEGPTTWSSTSTETSADRFAKISSTNVPKGTTSKSAKEFGENGEEEETLYDDSICWETMIGQEIVKLVTMDLYITIISIFLIEFVRGVWIRYCSTWW

SEQ ID NO: 164819 - protein, 106 aa, Heterodera glycines
  unsure (1)..(106): unsure at all Xaa locations
TCTLARDSCTFLLPLCYDEYLLYRPLFGLDDSAGTLGAMTPPTPASLLFSFWPDXPHIPPFEAIVGGICRVLYDTLRPLVVHNPHLXTLGQLCTLLKVKMIDERCA

SEQ ID NO: 164820 - protein, 69 aa, Heterodera glycines
TLGRLFVNSPTEIKYFDSLGNYPNEDLSSYLNLFERILINDRIVQHQFSDACGQFCIYFLTQRCSGIPY

SEQ ID NO: 164821 - protein, 172 aa, Heterodera glycines
QDCINALHVRISDNFSQIIAFLRNSLSVKSDRRTGRVISWLESVKCSVVGLVSSLCSSDGDCTAAASVSLDQLRARILEVCQSQCDSTDQQQLLLRQCLLLALADLRRLRNVCAADDTFVDTLSEHCESVFLFRYVGRHCAQMEQLLHDEALSVKFIFLKVAESVPSIVFGT

SEQ ID NO: 164822 - protein, 100 aa, Heterodera glycines
FMVINTILNNLAFTVSQASIRTGSGRIQFGLHSPQPSTPTVTLSEESSLQLIRCWEQDNVQPPRFPISFWNVHTRAQMEIERTNNGMEAAHGQFAVQKIL

SEQ ID NO: 164823 - protein, 84 aa, Heterodera glycines
FTLITNTNYARLFCVPPCTPFVVLETADFIFRSPFWRTVDDRMGVRSFFAFCFGFSIFSFHFSFSPNSFVIFVIFMVILEHLIN

SEQ ID NO: 164824 - protein, 205 aa, Heterodera glycines
  unsure (1)..(205): unsure at all Xaa locations
ADRTRSFDDLESKLETEYIQRFLGQLTPLEESRLCELKYGLQSMHKGKMPNDAHLLRFLRARDFDVQKATQLTLNSLLWRKQFXIDSLLDDFVPPALFKKYFPGGWHYNDSEGRPLFILRLGQMDIKGLLRSVGLQSIVKFTLSICEQGLNKSAEATHRLGKPISTWNLLVHLDGLSMRHLWAAGGQGLFGIIQIVEAPLPGNQG

SEQ ID NO: 164825 - protein, 114 aa, Heterodera glycines
PNAEPAVQLLVAGPRDTVEQPICGADGQGSQHTSMLLPSGGFHTLPFAGAQDAVGDRERTRWRLLSWSMINRNDDQAQRAKKKKLSTLRNGTCKLNNIRQWLPQRRNAVIQKLN

SEQ ID NO: 164826 - protein, 137 aa, Heterodera glycines
VIAQIYDEFVWTGDELGTLSIFEQDEHQLLMTNSAAPLYKIDTIEMLEESSQSKTFLAFGHPPLSRLITIASSLSSSSAVRHIVAFRERRLIIVGLTVAVLLCPWHGRESVPQLICCIPLNPIPSLGASDANAVHLF

SEQ ID NO: 164827 - protein, 91 aa, Heterodera glycines
ELLLYLIDEGTDGGTSAGKMSPKARVLASVRLPLFPLARNHKIRGTFPLLDRVEKRTKKYLFLNISKLGRRICHFRGVHRCVNLLEIRLCF

SEQ ID NO: 164828 - protein, 169 aa, Heterodera glycines
  unsure (1)..(169): unsure at all Xaa locations
MTMFERCVNKHIQFIMLVDEKRKDTHGLLKLSEAMHKVTTQHVTLEKANDVVRKNQRQTLENILNKLNMKNFGLNYVPVMEPSACRRFSLENGNVLVIGYDVNHPAPMPQQTRRLLASQGESQLSSLDPSCVGICANMAPDFNAFVGDYFFQESRREAIDQMQLXDRMK

SEQ ID NO: 164829 - protein, 204 aa, Heterodera glycines
FKFESYYVIECFNAYMANRCFKCSNGIEKVDFPTFAELRAHMSQVHQLSFCHICCDNLNVLTKDRRVYTRDQLQRHMAGRLHGEADGFRGHPTCQFCEQRFYDDEQQYRHLRKDHYFCQFCDQDGLEQNVFYRNQHQLNQHNRKVHHPCTDPDCLHVGIVFRTDTELDVHRAKHHRVCGGSRAIPLDIQFSRSGSTRGGAPSRG

SEQ ID NO: 164830 - protein, 77 aa, Heterodera glycines
LFKNLVIDFLSQSRPALICRERRYQFGERDEIEMWLYIIHEAKQKNKAALICDQQFWELFRTQRLQFETSSVSIEKQ

SEQ ID NO: 164831 - protein, 142 aa, Heterodera glycines
VTSQQLSRIGANVYIGSAEFRELPTDERMKYQLKVVPEEQSNGICICEMNRKCGCVQVHSEPFSLLLPNSSSSDQSDFVSLLRPSVPFFSVPSPSSHSFALPPLLLACLFLSLTLILLAIILLLLVLPRSADQSGERKRRIL

SEQ ID NO: 164832 - protein, 188 aa, Heterodera glycines
QIREKLKSRKMPISGTKSELVNRLHESLVAEEKLLEDSGPGGDNIDLSGVNVDEVLGLDDEKDSAVSSASETKPNDSLLSLCSPLNESPELKKTEILSPAKKQLTVNNGIAGAQPTNTGEDGQEKHSESESATDEDTGVGNKTQSNDNERKVQLKMAARLGVPLGESEAKRARATRFGYNGCGGENEL

SEQ ID NO: 164833 - protein, 56 aa, Heterodera glycines
MGTQPNQSKGSRRMKKKSLCPQRNGRGGGRIWVINPRGVLMPNGAGGGGGGGVSQQ

SEQ ID NO: 164834 - protein, 189 aa, Heterodera glycines
MEDASSSSLLGENKTIELNEEADFSAPMIIRNESEDNLPITESLAETNDSPQQETDSLLSLSQSESDVASKPKSKTPSRAVLAPDVTHVPIQAADIVEYEWPSKSGDKFFLQEQISELLGINSFKRKYPELVRRTVEPAERDYLLKELRANIALPAHHLTALQAADVHELMASEYPFEYAEYKKCAMSA

SEQ ID NO: 164835 - protein, 175 aa, Heterodera glycines
LRSSSVLSTQRRTVHERTSSVYIEQMYESWQLDRGSVHRSWDAFFNNVNAGAAPSQAYQAPPSVPSLSTVPHATVVPRAAETAGQVIPADELTRAINDHLKIQVLIRSFQTRGHNIADLDPLGINSADLDDTIPRELELDFYGFTEQDMYREFLLPPTTFIGANAPRCSCANLQP

SEQ ID NO: 164836 - protein, 112 aa, Heterodera glycines
DRLTNRAFEPASASLASSHPSSPPRDASHSLPSLFDDMNINSSGSSFGQERLCFLPTTARPLNENVFAAFNRQPHITPQANGFGDPPRTYNSSENSRQNGSHFSSAFQRHGS

SEQ ID NO: 164837 - protein, 153 aa, Heterodera glycines
KGMAIGNGYMNANLNIDTSARFAYGHGIIDEKIWNELEQRCCRGCIDGCDLTALKDSCEFLVDDIFEFLWHGGLNPYDLYRDCDPSPGRNYIRMEVLKNGLVPPKMLRRFFSNVTRNFRRRLRDTGQGAQNVGTPSEASLKRSGLTTYMESTR

SEQ ID NO: 164838 - protein, 155 aa, Heterodera glycines
  unsure (1)..(155): unsure at all Xaa locations
AALATDNGSGMXKARIEADDAARKEFPYIVGRPRNRXVMXEMEQKDSKKRNKPQTTTRILTLQGPIEHRILPNWDHMENIWPHTFYNEMGDTPEEHPLLLTEDPLNPKASREKMTPIMIETFHTPAMYMAIQAVLSLXPAXRTTGIVVNSAHGVT

SEQ ID NO: 164839 - protein, 97 aa, Heterodera glycines
YLPRFTNELFTVAEVHSERSPVVYRLRDDNNEIISGWFYANDLCKTLEDKQQKMYEIKKILKKKRQNGVDYAFVKWKGYGTRFISWIPVNSISEKNI

SEQ ID NO: 164840 - protein, 70 aa, Heterodera glycines
SNERFSSLGDAFGRKSQPFGFTLYAMFAFACPCSRPYSDDGIYKHKTRVICYFCILRDLKIQKMQEVTTL

SEQ ID NO: 164841 - protein, 86 aa, Heterodera glycines
KVSIFLLLGFSRSLSLAPISAKPGPRTKILLLNRQLKSLNFVFLFVKSCLNTRKQIESINCCIYLSLFIRKRLNSQVWIFDFCFIK

SEQ ID NO: 164842 - protein, 63 aa, Heterodera glycines
LILVHVRIIPLILVHVRIIPLILVHQNNSAYSGTRQNNSAYSQNDSTYSCTRQNNSAYSGTSE

SEQ ID NO: 164843 - protein, 149 aa, Heterodera glycines; identical to SEQ ID NO: 138388

SEQ ID NO: 164844 - protein, 194 aa, Heterodera glycines
MFCTAQLVDFYQSIEHHELYVLYVYKLYTLHRTVGNWVEAGLTLKRHADLLRWSTSHRPESFLCGTARKSGGTEFGTELELKEYIYKEMAELFTQGEHWELAIETNRELANIYETATFDFAKLADLLARNAALYDKVTKTLRMESHYFMIAFYGKSCPSHLVNLKFVARGRPLEQWGCFKQRFVANFSDFKFVD

SEQ ID NO: 164845 - protein, 166 aa, Heterodera glycines
VSIPNSNSSNNNNSSSSSSSSSSSSSRTTMFNSRRKSDFSALNCNRHSEKNNLAALNAIGAPCSTVSLQRTSSDRRFAMPSSLTSPSIASSSLVANNAGGRVSAAMASKRRRCSRVINFGYACAIYFLDEPPEMDDEDEYEEEEEEAEGMGVLAYQTVEGAQSTDN

SEQ ID NO: 164846 - protein, 152 aa, Heterodera glycines
AAKLDRWVFDRVKLFFDEIRSDANAKSRLLGLRRAIFFLHLLGLDTNGHGHKPNSEQYLKNIATVDEGILGIVQMVEGFFGDNRTAFLFTADHGMTDWGSHGDGTDDEVNVPFLAWGAGIEPSGASRKLSLAQVDLAPLQSALVGTAIPVNS

SEQ ID NO: 164847 - protein, 212 aa, Heterodera glycines
SIWPWAKKQEILTGTGLFVDIVACIPKCSVGFERREELAKLAVQHATNSSDQMEDGDLSLVSFGSSALPGALADYSPRDEAKSNYLSEYVSKTISAVEWLIKLDRLRQEEAIRRAMAKLSAERAPKAEIEGCRASDGRMTRTISLPTSFLPPLHLSNFNLISSKQISPEHVQQGDGQNQSVPFAPWLTAFRQQQNQSPSLTMAPSQMVKSSQ

SEQ ID NO: 164848 - protein, 211 aa, Heterodera glycines
KRLAAESLEASNGKRRSDHDGVENGEKRKRKEPLTAEEKALEERKREVAEELGEHLKERNREHERHKIYEHEQNFKALLVDLIKHTDISWHDGRKLMRKDNRYQNCELLEKDVKERLFKEHVRELERKRRDVFFQLLDEHQDITFTTRWHSAKKIIAEDERFGKLKMDDKKLEQDYREWMDRRRSQALDDFETLLRETKIITYKSKQMIAE

SEQ ID NO: 164849 - protein, 198 aa, Heterodera glycines
SKECFSLVYKNDERRDQRTKGRETEETPLSRRNDTHLLLEELFSPQCIHVLGQVDARVLDDVHVKLRFVMPKIGRIRFRRVFYDHIPAHKGQKCAYLISNPLERRQLHAFVTKLFVLLFNAELLDHSNVKMFCENIATTFIDLRNRGFLMSRTQILKGIRFDQILWLKGLHFQLKQSIVLNILKSFLNLFTRIFTYFF

SEQ ID NO: 164850 - protein, 184 aa, Heterodera glycines
RAVQNFKKSANKIIISAVKPSYEVKSFSKQINPLTIDEVERAEVHLWKEAQKAFPPSNETILNLNLFQENGIWRAKGRMQNSGMDHYAIHPIYLNKNCPIVEIIIMDIHRERKHTGMENMVASLRSKFWIPSVRSKVNSVLRINPNTRCWICARFHAKAYVYPEAPPLPSYRVSGNLIWETIGL

SEQ ID NO: 164851 - protein, 118 aa, Heterodera glycines
IFKCFIIFEVLREHYDTESCAEKLKCTIDKSSPGCLETLSCVNYCVWAEGYKESECCRENYTLSCWTWVSFKNCCMFQGYSRKISRFLGISRFVSIRVAPRSSGRRKSGIGEKIFHKI

SEQ ID NO: 164852 - protein, 50 aa, Heterodera glycines
FFQNYFYFIRFLKIFYLKIFFLSFEGKLYDGWWGLSAPVFPSVFSPLLIC

SEQ ID NO: 164853 - protein, 76 aa, Heterodera glycines
NKRLIVSDVDGICRSINVRSCPFFPSSSSVRFANHLRSPHPMPSPNHCGDRISVCLDTFVDGLNKSHCVRSIRWHL

SEQ ID NO: 164854 - protein, 176 aa, Heterodera glycines
MDNEAAGTVGEAVEDEEVMTDADFERAMEQLREEGGEDVNELFMAMSENRIISWEEAEHILGNSTNEPVKSSLPQQTRPTEPDNDTDVDWCVQRLMNNDPKLVEINLNNMKRTPIPKIKRVIEACRDNEHMEKLSLANMGLYDTDVQPLIDILENNATLRCINLETNYLSGDFFAR

SEQ ID NO: 164855 - protein, 106 aa, Heterodera glycines
MDSSSLEYEVQQNCNLTQIGGVLGSKGYGIALQKNSEWTDRISRQILLYQKRGIIAMKKTKWWRSKGASCHGVGSSVKQQRISLNLHNVSGLFVILSMGLLFSVNF

SEQ ID NO: 164856 - protein, 85 aa, Heterodera glycines
ENEEENDDEDEDDFDEDDDDEPSDEKTLRDIPLDKIDIWCFMRLFKDKDEDGQGDRMICISLAQVGSSSSTRRTTLTPFDILPLF

SEQ ID NO: 164857 - protein, 164 aa, Heterodera glycines
HSQFFFDPNCPETCSPFYLDALFRKGHLVIRMLEKRLPKEQFVKVLQRILSLGVQYSQNLYRPVEWTHMLINTAMFLRVMTDVTGKELPSFVEQWIDFGGFVNFQVSHIFNRKRNIIELELRQTVPLREGCRNYTGPLAIVVQELGGLFAHGMRRDGGGSRQGI

SEQ ID NO: 164858 - protein, 212 aa, Heterodera glycines
GTFDQPHHYQRRQNMHNSLFSATYQHANNKWMMAAMPAEELSTEVIVHRKAAQRHRRRTVSKSSGGDSDNGSSSRCHSNANLHAFEESSLEGKEGILSVTSNANDDEMTVGKMDAEGMEQAPVFEEETPALSALRDSLGLGETTAKSVAIDIKPKHRLASFGSPLPSLGTSLQDELLLAAAAVTGKDDDDKITVEELARKKFSQQGMALNSK

SEQ ID NO: 164859 - protein, 182 aa, Heterodera glycines
IFRQFLRRFLVANHRFVPLESFWVGRLNSVLHSTVCGVGPSNFSTGFANHLVQHRFFSSQSDGLNVFELGSENDFDDRVLQAQQPVMVQFYADWCGPCQNLAPRIEAKVNGQNGEVLLARINVDSSLGFLTAQFDVTSVPTVVCFHNGEVIHRFEGDVDDSYLDEIIAHLKEGNSENDKEII

SEQ ID NO: 164860 - protein, 104 aa, Heterodera glycines
YLMKRMFFVFVFSGGVPKRSNSIDFRCSLRRSLAENNGLQLRTIHSIHSHFHIDSFPPIIFYFLSRDFVIFIYLKPTEKFFSFLAIFLADFHQKNSQFFDFRKV

SEQ ID NO: 164861 - protein, 205 aa, Heterodera glycines
YLSTTARRQKKTWHQTIARTLQKDIELFEPDPTNTQSAFVGANQQPQAVGAATVGSETGDEATATAAQQSTQQQHHRCAFALRERDLFRIGPMHEAIMQLSKRHTSTVSAASTPTAVEKELLGLGTSEADVLQSGALSDLTGGPKTRGASKRKAAAALAVSCTSSVSGGPTAGAATNVLLPAMSSPQCNYSVPPAECLLMCRLIV

SEQ ID NO: 164862 - protein, 184 aa, Heterodera glycines
MAMSYAGDVSAYGVTNNPHDTRRITGGSSAGEGALIGAGASLCGIGNDIGGSVRIPAAMNGIFALKPTTVPDHVVPIFGILPKSLLYKPALNMLSNGPMCRYASDLPLALAVMAGKKVDAFQQDVDFSKVKVFYMDDLNVLLAQELQNAQQLPVKMVKSYFEFKHNVTVQRVEVPLMSRFLQLF

SEQ ID NO: 164863 - protein, 205 aa, Heterodera glycines
MNIQSSRSVLDDQWHTLLVEREAGAAVLYLDGRLEAQNRTNLGTIELLQLQSPLYIGGLPPELVPLAARLLPGVKPEFGGCLREFSLNDLALEEPVAEKDIAQCSQFIEQGIFFGKDGGYAILSPQFVVGLSFSFELELKPRTKTAVLLSVGVLEFLSLQLLNGTGKFREGQRWRHGIRCSTSQSVPTSWCDGPWDPDPNLQKKR

SEQ ID NO: 164864 - protein, 140 aa, Heterodera glycines
MKNLTTFVFFLIIAALPPIVSPAQSPPYGQLQIKGSKLMSSSGKEIVLRGMSLFWSQWDPKYWNAETVKQLKCNWGINILRAPMGVEGSDGYLQSAAASAANTQKLMTIVDACINLGIYVIIDWHYTSGKAYTAPAVDFF

SEQ ID NO: 164865 - protein, 173 aa, Heterodera glycines
  unsure (1)..(173): unsure at all Xaa locations
NPGLKYTIFTKRVPAPFETISFSNRQIIEQVVKGRFKQQTNSLDLSSFQNDPLFERSQLSYGLFHNHVVVAVANLIARNFPSIRGIRLNNNSLRTLDFLSCLVYAAPNVVELDLANNAVSEFHAXNELDKLKSWSLESVHFENNEFVASYQGNFVAYSQAIHQFFPRVTYLDG

SEQ ID NO: 164866 - protein, 176 aa, Heterodera glycines
CTAMVEADILCPTKHFPELAWARELPKSDSHYVTNVEFTEKDEFGMEVRRNGRPMPVEYLLVDVPCGVRLQEVHKFTVPESVDETFPIENRTIVDQHQNLRDLAKYVSAFDLPDQFLTMASDFHFLLFLFTNHHVEFSVAELKSLVASVRKSDAQGAKEWAERSENWGTLLLLSQS

SEQ ID NO: 164867 - protein, 59 aa, Heterodera glycines
EFGVAQRTFLNVFRTFKFKISLCSSNQQSVGTFNFQISVYYTICTLLLYTHSECYTNCG

SEQ ID NO: 164868 - protein, 173 aa, Heterodera glycines
HHHGQQSSVGAACSSTQSSAPSSSQSEQADSTLHPEERKRILHLHAEKNRRFALKEGFESLVNAIPVVEQTGVKCTNAVVLNRAAQHIKQLKSEQDQQQMKLRVLREKITNMNERIALIQSNLPSSSTGGSRPCEAQTPSMRIQVEQFFEHYKKERSREDYRFWLMGEVLKPI

SEQ ID NO: 164869 - protein, 192 aa, Heterodera glycines
MACPNICFTSGAIDLDTTKNESVCSMELPVYCFDVVLARLNKRPSPKCPPTIPNECFPLFVSWKKGHARQLRGCIGTFSRNLPLHEGLNEYAQISAFRDNRFDPVGLHELPSLHCSVSLLLCFEPADNYRDWVIGVHGIRIEYRQHHRALNAVYLPEGAYENGWDHVETLKHLMWKGGFRGDITEGQPQMGL

SEQ ID NO: 164870 - protein, 203 aa, Heterodera glycines
DSPPPSTLCHYQQQPNASLKSHIFDESDCSFSVLDQRLLPSAVEYVRIRSVQDGYEAIKEMKVRGAPLIATVGMFSLLVDVTASSTATAEHFCSDSFVQKTFRQSVERKCQMLLSARPTAINLANAFHELIDFLKNDEDNNSDAGTETAAEINRRLKIRLKHFVLDWQSRESAENAALLHNSVQAVLNECAATKNVGQNDDDN

SEQ ID NO: 164871 - protein, 118 aa, Heterodera glycines
TIKTTERLKLTFILNFRWYNEVLNVPFNENGTTKNDEILKAFRHELRHFQKFVSNRIFVSAPTLQFKHDVAKELAKRLWQHAPLGDLQLSLREHYVTNRFSYARLRLLNCPKCVQFDL

SEQ ID NO: 164872 - protein, 122 aa, Heterodera glycines
KLFYVPQRPYMTIGSLRDQVIYPDRPADMRRRGFTDSALEALLDQVQLRNILEREGGWEGQQDWMDVLSGGEKQRIAMARLFYHSPQFAILDECTSAVSADVEDAIYRRCHELGITLVTVSQ

SEQ ID NO: 164873 - protein, 181 aa, Heterodera glycines
  unsure (1)..(181): unsure at all Xaa locations
IVLGIASVCSLLAIIATVVTLPSLYSEMSQMNSKVRDGVEAFRVNTDSAWTDLXXXVQVVVTPPSKPRDNPFNSIFRAKRQLPGHCQCAGLQQPSLSPPGPARPLPNRPGTAPGTPLKXQEKPEKPGRXGKPLSFWPPKNPPPPFSLWGPPARPQGKRDPPHKKRPPPRTHWSPPPAGGGR

SEQ ID NO: 164874 - protein, 128 aa, Heterodera glycines
RVKAYRFVAYTTVSFSIISLLSVCLTLPMLKSYVSNVGMKMDSELSSCQHNAKDIWSEVSQLKGLPLLVSGNRTARSAYGSGQECCSGGAQGQPGQPGQPGNPGERGICPKYCAVDGGVFFEDGTRRR

SEQ ID NO: 164875 - protein, 152 aa, Heterodera glycines
  unsure (1)..(152): unsure at all Xaa locations
NSQESQVASPVKAGKATTKTTASGKGGKAKADGKVKAGGKGAKKAGGKGGKVKIAASGSKNTRSARAGVAFPVGRIHRLLRHGRHAQRIGAGTPVYMAXVLEYLAAEMLELTGNAXKEKQKLRITPRHLQLAVRNDKELNKLLAEGTLSSGG

SEQ ID NO: 164876 - protein, 181 aa, Heterodera glycines
MYCHVGASPVTTVCCPAEQINPCAQSVEQGIGPNQLERFAFDVQAQQCVPFAYRGLKGNRNNFLSQEECEVACLPNSCPSGSPFVGADGRAQSCAVSTAMSTCPNGYWCHVGANAATTMCCPEANASPCQLPMSTGEGPFRLDRFYFDLGSKSCKSFIYKGLKGNQNNFLSLRACQLNCLP

SEQ ID NO: 164877 - protein, 136 aa, Heterodera glycines
HLSAQTDHHHHPSNHRQHCPPLPERFVAGLRCAFQLLDINGSGKVPFEQICKKWPVHFADLPVPSNFLECLRRVNPSEEMVTFEQFIKGAQLALRERMNTAGRLKRVQSEGKLFGSDLENGKSGESNRAKSRGAPS

SEQ ID NO: 164878 - protein, 122 aa, Heterodera glycines
VREKYQTDFYVLDKYPLAVRPFYTMPDPNDTKYSNSYDMFMRGEEIISGAQRVHDSAMLTERAKLHGIDIEKIQSYIDAFRFLCPPHAGGGIGLERVTMLFLGLPNVRLASLFPRDPKRITP

SEQ ID NO: 164879 - protein, 213 aa, Heterodera glycines
KYRKALDEDQLARQLYELICRYFLATCLCPSKIAEMTIKFSIGPETFKSVKHTVVVQGFLLVVPWMRPEFCDTELPTEATKQLNQFIKQTFIVSDVRRLQIENPKGGLSEAKLISQMALLELGNYDTIPETLSKLMQKKLANVVGPGRWIVPTSEGLQRLESFRQDGVDTDGNTEQVSDDVLEERDEDDGSDVREVKQHSDRRARKRVRFDLT

SEQ ID NO: 164880 - protein, 66 aa, Heterodera glycines
EAKVEGDANILCKLSAPSVKVKTEVDLHNSQLNADQLYEYAKNCFKFKNICVLRFRKWSEARNFYK

SEQ ID NO: 164881 - protein, 193 aa, Heterodera glycines
MAALMMLTFLLMSSFVAEMANALKILIVQQNYMFFRSHFGFGLNLAKYLAEEGHQIHMLIPITDETYKLKNKNDEAQLYVRYFVPKKTKPLHKLIMEGDKGKMSDRIYKEIAEDFELMDGLRAEKFDVGMAEAFCLTEYSLALFHFLQIAVTIATQSQPMSPFQLHLMGHLSKMKQSEGMPTEFIGISTMNFF

SEQ ID NO: 164882 - protein, 214 aa, Heterodera glycines
QKLVIPVSTFFTPLKEKPTDQPKQPPLEYDPIFCQKSSCKAVLNALCMVDYRTKVWVCPFCNQRNPFPPHYAAISEENRPPELHPLFTTIEYTLKKATTLPPIFLFVIDTCIASEELKALKESLQKAISYLPADALIGLITFGRMVEIHELNVKGMARSYVFKGTKEANPKQLRDIIALQIGLPSATVRRQSAASTPVPHHPIQQPLINGVHPG

SEQ ID NO: 164883 - protein, 206 aa, Heterodera glycines
DAVKLSTFRRVKSGTHSSDFVEMPFTGSDFDVRPLLHHITHASLPDILDIGLGFTTDVPLSSPLSHSLLSLQNGTLPNFLFYCLIEMASELRLRHSKLFFSSRPLLLSIDLANSLPLDKLLEAFETNELPALCLLNTEKKSFRCMTGEKNIENFTTSNAPADFAQRMATEKSKAFEFLGNGVGPTGDFPSSSHPFAIIQIEHIGAL

SEQ ID NO: 164884 - protein, 154 aa, Heterodera glycines
RKDAPLGHRIGPAPSPSSASASSTLTHFQWKEGRNSAERRTAYEGICAIPSQQKPTDAFYGIFARLFDKNTIELDKTERDDDIKDNYMMYFISKSEEHPTNISRRKEPNGETDGERRGRSLSPKVERQTRTSKCSVAAHMSIPVDQLQPRNCRM

SEQ ID NO: 164885 - protein, 86 aa, Heterodera glycines
  unsure (1)..(86): unsure at all Xaa locations
YPRAPTSPVQRRQTPQTTCNELHATPCTPXPMGQNSQNFATEPPVSPGAPGQPGTGGGQLQAGEASPSALYGQPLQSAEPGFTGQS

SEQ ID NO: 164886 - protein, 219 aa, Heterodera glycines
RQRSGGRSASFFRVLDELKPKGIKVVGCMCMCRNSIGSHSYTCDEIITSRSGKRVHIYNTDAEGRMAMADPLAEAKEKAMKANNPHLFTIATLTGHLILTYGHCSAAMDNGPARAANYAEQLRKTGDEFGQPVEVSRLFSEDFDFHSAKCEAADLMQSNALPSVRTPRGHMGPSAFLMRVSRIQQGGLDSAKPLKSPHLDIGISMGGKPKPFGHPSPLL

SEQ ID NO: 164887 - protein, 96 aa, Heterodera glycines
FPLAKSNKFCMTKSLLLYEEEFQCKVEGDLFRSEDGLLNSLLSFEHFARKLRIVERGWPSGFRMWFREKSGWIYERCSLVARIKGGFAQSDAHFDM

SEQ ID NO: 164888 - protein, 115 aa, Heterodera glycines
YTKTIEIIAPKNHHNSILLGMNGGNEAASSSSTSAPPNATMLQLNVPKNQQLFMLNPPNGPVVNIGDHIQGDGGGQQQSTSASTPLPDKILDDDDNLPPPLLTSVIEQDGEEIVL

SEQ ID NO: 164889 - protein, 145 aa, Heterodera glycines
PNWIGFAVTPPPPKKPPPDSAAFAAKFAKVFVPGREAPPKRLLPMGTDGVVKVEAPLNRATETAVVVTAGSRGSKVGLNPTGSVVLAVTLAAKFDNVFVPGRQAPPKRLPLIGMDEAVKVKVPLNGATETAVVTAGVGSVVGLNP

SEQ ID NO: 164890 - protein, 195 aa, Heterodera glycines
  unsure (1)..(195): unsure at all Xaa locations
MEWRKGQKRNAFGSFSDAEFDQTNEQYNALVEEMDKQSKLNKSVFDDLDEEQRQKLEGFRPGLYIRVKVEDVPAAFVDXFHPTFPYIVGGLLPVEQNDGYVQVRIKKHRWYDRLLKSRDPLIISCGWRRFQSMVVYSVLDHNHRLRFFKYTPKEAFCHGAFWAPFVTQNTGFLCLQSVDEEKKGFRIAASGVVLG

SEQ ID NO: 164891 - protein, 166 aa, Heterodera glycines
MSSEQSKLLLQKQLNELTRNPVDGFSAGLVDESNLYKWQVFIMGPPNSPYEGGNFRAELVFPKDYPLRPPTMRFVSRIVHPNIDRDGNVCISILHEPGDDRFGYEKASERWLPVHTVETILISVISMLSDPNFDSPANVDAAKTHRENPTEYRRQVARCVRETEEQ

SEQ ID NO: 164892 - protein, 140 aa, Heterodera glycines
PLDLLAFTLILPLLPPLIHHLSKQHQIKSDPIFAEFDSGAHGLQTFLNDPSIERNNGVFVGGILGSLFSFLQVLSSPIVGSLSESHGRKSLLLAAVIGSLISYCLWSLSSESFSIFFVPRLIGGLSKASDPVAIAIVTDI

SEQ ID NO: 164893 - protein, 167 aa, Heterodera glycines
MLRYKVIRSLYPVLCLIASLYYALINRVFTLISHFWPKSKVTWTEGEAEEPLLFMSAKKMAEKIRRKEISSSQLVSLYIARLCRVQPLINAIVMDNYEAAKEEAEAVDLYIASMDDDSEELQTLTTTKPLLGVPFTFKNNMDVKGFVSVAGFNKFLKNAPAERVFES

SEQ ID NO: 164894 - protein, 205 aa, Heterodera glycines
MNDFTTVAIALLSRYSNNLLKKDSEAALSGEIVGDERETENIVRTLITIIDSFEENEFFAQGLYRLSGSLTTQQNALNIIENANGRELKLYFIYELNATDKASCIKTLLRKMPDTLFPHCQRVALLDLSGMVTSYGAPCESDDRILKALQILVYFIPETHKQCLECLLIHLKRVSAHSDKNKMDESNLGLLFSSYVFPVQQQKYE

SEQ ID NO: 164895 - protein, 213 aa, Heterodera glycines
EKHLHFVRLAEEAARYDEMVQGMKQVIELDAKLNENERKLLGVAYRKSVTGQRFAWRVIASVLARGKGTKRQLEMVKQLLNKLEREVEERCREILDLLDWVLIKEAADDEAKVFYLKLKADHFRYLAETRTVKNGVAEKAKQAYQEAFDLAKNKLRPMHPIRLTVALNFAILQFEVQKSPADACQTAQRAYDDATSDAQTTGESICAESVTIM

SEQ ID NO: 164896 - protein, 100 aa, Heterodera glycines
  unsure (1)..(100): unsure at all Xaa locations
MAAASSASGTSSTTSSSSSSSSSMIPLDIGLCMLPIAENWCNTQVKVVKLNYMWTINNFSFLPDEMGXETLKSSTFSGGXETKLKRCLGIKPKGLEQESK

SEQ ID NO: 164897 - protein, 98 aa, Heterodera glycines
LEAVESNTLQLLANTLDDALTKAELVKKRQSEDVLLHMTGLNTKYLLHLCEMRGSTNADDPNGYVSVHSVKIPEAANWNVRNPSPIISIGNVTYIILI

SEQ ID NO: 164898 - protein, 83 aa, Heterodera glycines
GGEGPPGPTGAPGLPGLSGNIGQPGQPGAPGQPGKDSGYCPCPPRSSAMALKKKMAAVKIFLAKRAASNCDAKDNPIIGCWRN

SEQ ID NO: 164899 - protein, 169 aa, Heterodera glycines
CPKAFLHDISVGHCKRFTLIGKDSKTGEFGAVLDERKWHNQLFMSSTNFLPIKEQQQQFMDELAAKLPCPGRHCIPITTPSFFFWTEKNRNLFDNVMDSFSGQLLLALCSLLTIGIGFARMLRPAAEYECFDYCMALYSVFCWCCSAWASSYLLLYWTPYWSCMNFRAD

SEQ ID NO: 164900 - protein, 170 aa, Heterodera glycines
MSGHVNMQQECTVYLRNLDGKVTEKLLEELFVQVGPVNFVTIRDPQQQHKGPHSADTTPKTSGNRYAFVEFADVESVLFACEVMDAVEIYGQKLKVQPRDNTLQRAIFTQMNMHTASWERHHAPAADSSVAGKGRPATRHSDIGVYNELERQSPGAGGGQRIVTFNRSHG

SEQ ID NO: 164901 - protein, 212 aa, Heterodera glycines
HTESALSLDGIVVTPADEHKREKLALITLLNYFSSLSTHWAQLLRPFATSIFQLIPLFSHYSNENTDEELRGCCNAQLVRYMGLSTVASAADLEELFATCTTLRERASWWKSKVCLLRFLQVFAFTNQFFISAHPNGFSALEQLIIDFLCDPRFDVRVAAAETLGGLIRAAIIAVDQQFLAKARDMANSTDPITRHSGVLALSAIVRAFPYS

SEQ ID NO: 164902 - protein, 213 aa, Heterodera glycines
  unsure (1)..(213): unsure at all Xaa locations
KIEQGQIDWSTAEALAIGTALLQGNDVRLSGQDVGRATFSHRHAMLVDQRTDKVHVPLNHIAKDQQNFLEIANSPLTEAAVVXFEFGFAIENPHRMVIWEAQFGDFYNGAQVQIDTLIANGESKWLLQNGIVLLLPHGIDGAGPDHSSGHIERFLQLTNSREDQRPPDGDDVNLSGGNPSTAAQYFHLLRGQIVRPLRKPLGIFSPQMLLRPP

SEQ ID NO: 164903 - protein, 187 aa, Heterodera glycines
QSLENQLATKLLHCQRLEEKERVLTENRVTLEHELRIRDQNNETLRKKGIEFSQLATDLRLRLDRLDIQFTELRESVIKKASSYEANANKIKRLEEEKSSLKRKLDRAKRMEKYENVDELLQEENRILKESLTCPSCKVNRKNAILDKCHHVFCFECIRLRYDNRRRKCPKCNAAFGANDFHRIYLE

SEQ ID NO: 164904 - protein, 167 aa, Heterodera glycines
AHGVQYQFPSLPQPSPHTQTTQQQQPTTANLHYSQSHQQQAVPFQRNLNVLSHPMLFQHQQNVQLSQQQQQMGTQQHSVVYAGGHAMPTQHHQQYSAAYPLLQQQQQSQQFPPSTGAAFAPMVIPLQNDPIAVGIRQQHQQVYQHTPSHSALQHGTSHAGGYLAQQK

SEQ ID NO: 164905 - protein, 197 aa, Heterodera glycines
  unsure (1)..(197): unsure at all Xaa locations
HSEDIGRLFSKLDYAGISLLIIGSFVPWXYAFFCRVLPMTIYISMIFLLGIAALVVSLFDKFSQPKYRPLRAIVFMAMGLFSVVPALHLLVTDGIVWMFEKASLHWLILMGILYLSGATIYMVRFPERCFPGKCDILCQSHQLFHLFVIFAAAVHYHGVLELAMKRLQDGSCSEQLISHSGSDEATIQWLDDRLRPY

SEQ ID NO: 164906 - protein, 193 aa, Heterodera glycines
TNPLNSDERKRHEFIDCLAIELIRTELLPYAAALPREFMQRIIDILNRGSINTMDSHDVLASDAYQQRADLSRVCFDALLSLTQTDAAASSATTSKPKSPTPSGGGVLRNSNQTTAACSSLGATAIASLLQRCSKVLNDYAKDEQTAGHFRLPQERIFEAISALQAITALIEGFSRNPNNPTLYSHLVTLHPS

SEQ ID NO: 164907 - protein, 148 aa, Heterodera glycines
  unsure (1)..(148): unsure at all Xaa locations
QLLRIMRDQIRSSGPITVDEYMKICATCQLGXLSLSKRXFGERGDLVTSPHLTQIFGEXIASRAVHEVEMTSWKDQWPFGKLGSGSGELKDDGLCGLRQFDVLHKVEAYMVKNSKRLVERQRHTLRKKCGEHLLRTIRWYHSLDDVPQ

SEQ ID NO: 164908 - protein, 217 aa, Heterodera glycines
KTREVEALPTATPTTTDEDDYDISIDSPPPTAQSGGLGGGPSAAGPPGLLGAGGGYAWEEEYKRSWDALQEDEDGSITASVSYFTSQLKRKRLLRDTRIVQRGLVRHLVVVVDLSQACRDVDFKPTRIEQVCVLLDVYLSEFFDQNPLAQVALVVTHNERAVQVTALSSHPGDHLRKVKERHSALLAAEADPGEPSLQNALEMATGILGHVPAHGTR

SEQ ID NO: 164909 - protein, 91 aa, Heterodera glycines
  unsure (1)..(91): unsure at all Xaa locations
GLVALPTAVVPXQIFSRLLILLCMAIISTFSADMLGQXCEILLRRLPGYRTHCQRPYAEIGLKALGPKITTIRSIVRNVTQHGATSVLLLL

SEQ ID NO: 164910 - protein, 126 aa, Heterodera glycines
MPSLSYPIGPPQPPVPPSYPIVPQAPFAGTTSPTACECCCCSAYRSCPCRPSCPPCCGGTHTTSTTVPPTKPTEETTTTTTTKDKTPKTTTSSSTPVTNPLLHPYNPCCLSLIINCPNNNCNCPPS

SEQ ID NO: 164911 - protein, 136 aa, Heterodera glycines
SDSPLDSSSSSSFSSSSPSSSSSSIFDQLGQNDLDLIKQKRHIGDIQQLWDEDEMNGKMRNALKPTSSNRWTQIRSHDGKFVIPFIISGQFTMEERQKIQKAMAAIANNSCVEFRPRKFNEFDYVDIQNRKDEGYL

SEQ ID NO: 164912 - protein, 203 aa, Heterodera glycines
MDQSKDQQIAQLKAIIEELKAGKHKAVTDQQPQSSSTASAKSPSKPFKEKVKGRLTFENGSAANYPVSFGEVQRRVESPDRMKISDFLTLFHLRKTGSNSVDLRKSIEKSGIEIQTGQRQHSEDTCFTFLLEAEAVKLAEDFAKLCISNYPIKPIANEMTSGENGGESGAKPYNKEELKSIGRFLAEVLAFQQADESPHPPAH

SEQ ID NO: 164913 - protein, 180 aa, Heterodera glycines
GQTGILGEFGLRGIDGKPGRPGQPGLAGLPGPQGLPGPKGARHPDAFSGLPGPPGEPGYAGMRGEIGPEGNRGIPGDRGPDGFPGIAGNKGDQGMEGVPGLPGTIGLPGRQGPPGIPGPSPQFIQEMHAPTGRPGDIGLSGIPGYPGEPGDAGLPGPPGPAGYPGAPGPPGESGIPGLPG

SEQ ID NO: 164914 - protein, 200 aa, Heterodera glycines
FTICSFSRFPFSSHLLFFAPFSSRAFVNSFSLRTHNCGELRLSDVGSRVKLFGWMAAKRMNKFVLLRDSYGSVQTVLPKALFSSLKNTNFESALCLEGVVADRGKERNDKMPTGDIEVVVDGLEVLNPSDAPLPVDESSNEYTRITHRYLDLRSEKMQRAMRLRARVVSKCRRFLEDSCGFVEVQTPTLAHTTPGGAAEF

SEQ ID NO: 164915 - protein, 212 aa, Heterodera glycines
LMEELTELPVVVELASDFIDRETPIFRDDVCFFISQSGETADTLLALRYCKPRGALLIGITNTVGSSICRETHCGVHVNAGPEIGVASTKAYTSQILALVMFALNMSEDRISMSQRRANIIDGLNNISDQIKQVLTLDQQVLQIANQIYKEKSLLVMGRGYNFATCLEGSLKIKELSYMHCEGILSGELKHGPLAMVDKDKCIVMVICNEMC

SEQ ID NO: 164916 - protein, 78 aa, Heterodera glycines
ATIFARINRISAITDPDWAMIATPTFLPFFTFCPSIRPPACTIEELPKIDIVLISHNHYDHLDVVGVRELAQHFPTII

SEQ ID NO: 164917 - protein, 150 aa, Heterodera glycines
MILLAKKCGVAPFAWHWIWTASSPPPLCLCAVLSWCCCCPPFSSEEAIASVGGAPGIVPEPEQPFEYGDESSSSLSTPFLFSSFSSSTVISCSFTSIWTFCCNGMCRCCSSPTIALLLFVPFCCCCRKCCCCCCWCCTVAAIAAAATIAC

SEQ ID NO: 164918 - protein, 129 aa, Heterodera glycines
QNRSLADQISEIDSGIDSLRQYHSPFHFAATNGPQKHFSDRRKSLGAVVEMAAVPLTDGTTASGNSEVDKCLAIHLDRAQQAIRVICQVQQSPFEYTLSRMLYRMESTETVALEMTLALAQNAAVNCQP

SEQ ID NO: 164919 - protein, 202 aa, Heterodera glycines
  unsure (1)..(202): unsure at all Xaa locations
LPFPSSASPPLSAIPRVRFLTLSLSFVSVVFFLLTLAFSVLILTNINALHTEVMVDIEQFKGVVSKAWDGMXELQAADGGQNNGKSAGKENAQTTIDRQKRQYGTMPSYSSAYVNKQQTCNCAARANKCPAGPPGPPGAPGLPGEPGTRGQDGIPGMPGMSQSFDSGYQDGCVQCPPGPPGVQGIQGVPGTPGSDGQPGTPG

SEQ ID NO: 164920 - protein, 204 aa, Heterodera glycines
MPVLQLNALDHDGLQQKKLNLPNAPRQPDILLGMDVWHELKIQPIEQLPSGFTICQSKIGNIISGKGRIELSQPSNVSFVMMVFNKESTGSKPTHMQKAKQHRESKTLRRHQINKLLSSAATLRSRRKRESVPNSTTPIVIDLSSDSERNSSDVEIIQDPVAGQQISSSNKHSTAPLPKALRRPTATKQSSSIAKRPASFRKQT

SEQ ID NO: 164921 - protein, 199 aa, Heterodera glycines
IIAVFQLFYYPFAVVVLFSFCSDFFWRCPMFFHTMNITAAPISEYSTMLVYITSLKLAVIKNYPFSFFRLYHSFSNSNSAIITQNALGPVAFSHRSFDGQSGTKQKAGATDGNVQICPVQMFGIFNRRCVPIDKLSAAFSVRRLGQFDQLRLCCCDWLRKGGMTGKHLSDLFFSMFFFSLAFCPPNFVSHQRFFNENVT

SEQ ID NO: 164922 - protein, 187 aa, Heterodera glycines
DKLMMMFHLYSLVFCFLFFILALSSHFGTCAGATEGDDGNDQNGQQQQQQQQNSRFSSSSSSSGSSNGCQFSINNGIISDGKGYSRRMTPAEEQQMGNYHAQVARATEEFQQQMAQAVQAPFRGGFGIPSIGQTPQLRLPQLPCFRVDSSSGGDGAQSSQNVAAQNFSGNAAGGVDEENYASVSVEE

SEQ ID NO: 164923 - protein, 102 aa, Heterodera glycines
  unsure (1)..(102): unsure at all Xaa locations
KPFQDLIHVDFNILFDKGEYLKVPEIVPFRLTRNMVDGFGATGVEGTFRKSCEKXMKVMRAESRMLRTVLHAFAHDPLLEWTTTEARNQQYRQVRLVARAVY

SEQ ID NO: 164924 - protein, 24 aa, Heterodera glycines
FFFFFFFLAPLSLLVRSEPGKNLS

SEQ ID NO: 164925 - protein, 160 aa, Heterodera glycines
  unsure (1)..(160): unsure at all Xaa locations
MLGAVPHQFRSPADFPAVEGVAAGRSTALAALCRIVCAKRSRERLDDEQLAFFFTILHEALISNXPCQNQFFPAVRYIIDRDRLMLCALLYHTSDELFKLALNGVQILLPNYVMAIDIVHTESMKLRLHPSVSQAEMRAACLRALASVLAWPSVFGSNLI

SEQ ID NO: 164926 - protein, 68 aa, Heterodera glycines
AQQLHFICFELRKYIYIKRNTPFKFPNANTVVSRRTKSAKFVKFLIKTTHNFSQTQPNCTILVSYDSP

SEQ ID NO: 164927 - protein, 119 aa, Heterodera glycines
NTFYNIYKWVGKKYSNKIVKILHKNGVFLFISRYLPLFASRPPLLLLPAVRLSCYCQPSASLVIASRPPLLLLPAVRLSCYCQPSASFVIASRPPLLLLPAVRLSCYCQPPISLVIAVR

SEQ ID NO: 164928 - protein, 169 aa, Heterodera glycines
MSELLRISIAPMVVRLKMYIETAQENLGKELTDQSVRADLLAERQNLCKTISLLEKYNGKWEAIFLRVKGQALQDEEQNYRDFKPEGKAFMHWVDQARGLVDTIEGALGLSELGDAIPQPNQPAQVVQQAPVVHQRHDVTLPPITLPKFSGEPREWPLFWKLFETSVES

SEQ ID NO: 164929 - protein, 55 aa, Heterodera glycines
FIFKCQCYSRAVPSFTIEFAHFSFGLAGCWEVIWHSFPIRSHFLLQIHFKILIYP

SEQ ID NO: 164930 - protein, 208 aa, Heterodera glycines
SKNVVVLTADSSASNTGGGDGDGSAAVPPTISSGATSTGAIKNQIKKSRSAGGVGVGNKRVPPTTMTAPVAVSPPSSTFFTIEPPQQQSSTTTTAAQYQKHLHQHQARAVSATSCTSEESEESVPDSWEEGRAPLLRRSPRSPLADDDDEWAAPSADDRTAGHEGVAGGTAVADAAAAADAAASPKGRRRIPRERRKAGYAFLMLVFC

SEQ ID NO: 164931 - protein, 86 aa, Heterodera glycines
KISVSFFQFLRNLLPDEDGSVIPDNFFGEFTPRSPTFLSPRVRKVVWALSLEVLPFLLSHFLPHSASFWHQKYSKLNYYYYNKLFL

SEQ ID NO: 164932 - protein, 190 aa, Heterodera glycines
MCGPPAPSSFAVAQAIIGVMAHFYRDEKVNLDDPLVYHRLVEVQKFAYAQRTKLGDSVFVKNARLISRNMTKHAFSKWIASLIPEKAQPLQYYSLDLTGHVPDHGTSHVVAIDHEGNAISATSTINQLLGSKRVSPTLGIIWNDQMDDFSTPHMTNLFGIPPSPTNYIVPKKRAMASMSPMIVYNKNTEK

SEQ ID NO: 164933 - protein, 169 aa, Heterodera glycines
  unsure (1)..(169): unsure at all Xaa locations
MALSALLLLLPLLLNVQNIPDESVQSDVKAVDSAISSLEQWKDPRNSLASLDSQLTEPQRALAKMFWELETIEKEKPKAPPQFDLGLFLEALEAMVEMNEEAKEVKLRKDKLXRMGRRRESKRRERXKTKEEETVPEVRVNENGKVEVTNGAGGDGKMEVKRGKDENGN

SEQ ID NO: 164934 - protein, 219 aa, Heterodera glycines
EDCARTAKDFKCAGTAATIITLLPADQVNSFVIRTQQDELLGTVRLRLPSITMVCVPKTESWLRSYTISTVAVKRCPSAGSCRDNNCSTMNSRVMVPELNELNHRPGHSMCMSSTSFWHNSCGLPSASCLFYRWAAVPTSTTVFEEFSCIEWDLQLSAWIEIETNNGKIETQRLILHPGVPEKWGNMTIAVIPTSLPPMPILSAYFISDGRAMAMGKPI

SEQ ID NO: 164935 - protein, 179 aa, Heterodera glycines
  unsure (1)..(179): unsure at all Xaa locations
SNGLNVIERSGDVMGSSLSPFHIVVWEQNNIWMGPRFADLVHTGAKFTPCIRRDDKIYEQITEERKTEAESTGCCVGLSGCFQTSECSVRKLANXIVSIFVQKQFATLLKWTNGTFPEMNYSRVVCGQDPRYCARPRSVHPYVWGLNISNWPICEKHSPSIPKSEKHMHCTVTGRPCCI

SEQ ID NO: 164936 - protein, 67 aa, Heterodera glycines
ETSLVSIMAVNNEIGVRQPLKEIGELCRKKNVHFHTDAAQAVGKVPLDVDELKIDLMSISGHKIYGP

SEQ ID NO: 164937 - protein, 126 aa, Heterodera glycines
SSSPSPSPPSLVVPFRPTVSHRQQRFVAVVGCGDGIGCAVRWRQPPLCRQGQSVQNGTIQINCRAQIFGGKPTATVEQTRPLRRAKCGDEIFDAISAAVRILHLRVQFAIECPFDVLVGGLAKCDQ

SEQ ID NO: 164938 - protein, 121 aa, Heterodera glycines
LVREIVAKKCGGAALSPFLKFMLGTYLPVTELLQSIVLNKVSFWVWHSVEFRLFILFPSQLNQRTVNDIDANWVGELRERIARVRSDPTRKSHLAMLRSLHSELYLLREDFITRNLGELIH

SEQ ID NO: 164939 - protein, 41 aa, Heterodera glycines
LFFPLISAISNPFSFDQLAQMFLLTSAIFPILCDQFAYILY

SEQ ID NO: 164940 - protein, 89 aa, Heterodera glycines; identical to SEQ ID NO: 136281
  unsure (1)..(89): unsure at all Xaa locations

SEQ ID NO: 164941 - protein, 116 aa, Heterodera glycines
VLAQRAIGHCFVGSVPSLLDRLLPPHDQVPPMLLFSSLLLVLLSALLSLLCCVQLCRRSKSSTHCTDVHELMAIAAEAGGPVVSDGRGGHCGGNRISGNPIYEPLLLSSLPQIPRH

SEQ ID NO: 164942 - protein, 175 aa, Heterodera glycines
MGDMGTSTEMLKPMAFCKGMAQQQTRRQIRAEVQQMTVFEVHLQQQTMTTATIIQNGTSHVMPCSSTAPFLNSVPLPALEMDINGGTAEYQQQQRHGGSNSSAENNGTGGGAKMQPRQRRKVPEGELCAVCSDRATGYHYGVASCNGCKTFFRATIVSEHSFVCQYSGNCDVTKN

SEQ ID NO: 164943 - protein, 68 aa, Heterodera glycines
QMHEMASSNANWSQSTALSTSAEIDEESIYKCVGYPHLNVVKDIFRALLDNSIEIAYKSKLKFCIFSV

SEQ ID NO: 164944 - protein, 105 aa, Heterodera glycines
RNGMTIRPKHTKTAKGSPSSKHLRRNEYKREKSSSTNFAPSSLAQSHLQIKGFFGVFFNNFFYFKSVGWPMIFRKTSTATAASHELVGIQRRSSKMVRISSFWEA

SEQ ID NO: 164945 - protein, 186 aa, Heterodera glycines
SSRFDGLVDTHFDGKSELKIWRPITIGKGRRVTSAAFMCGYKSVPFLSPDSPLKLFVKGKSEGFPLPDRLLSNKIRIKCLQIKHIDHSVIAFLHANKQIWDKRATNLRIFTFYSNTNIQPFMDVLVREILPIFAPTIQRLQLLDVDLLIKCHSAWPTILPDLTRLNSIDAHLILPSLGDDHLDAPT

SEQ ID NO: 164946 - protein, 112 aa, Heterodera glycines
  unsure (1)..(112): unsure at all Xaa locations
SILIICLIKFISLTISILHDHGFTDEEREKQKSAVYNNTVXAMATLLHGMQRLNIPFHNPRIENEAMIVMEVVNHGKESEPLSDELAHAIKTLWAGKGNKIVKKWIFCNDEI

SEQ ID NO: 164947 - protein, 178 aa, Heterodera glycines
  unsure (1)..(178): unsure at all Xaa locations
FLLLGLCCSKLIQIPHPPGANPVILPLKESEFMSEKKAKVKILGESNWSAEFPLDMAGSSGRVICKGIAKKKRAFEMTVDVQLGQSGLTKVVTILPFFLLQNDSKVDIEVREPHLTKWIVVPAESVIGFWPVEKKKHKXLVARYAKTKEESVQFPITEAFEGFCQIRNNLIGLYVIVS

SEQ ID NO: 164948 - protein, 103 aa, Heterodera glycines; identical to SEQ ID NO: 133313

SEQ ID NO: 164949 - protein, 182 aa, Heterodera glycines
FLRLFPSSSSSTLSATNEQSQIAPSQPLLFSAYRNLGLLCYSNGEPNKLHLVIVASAGSPPTAKILENPPNSSQPIKTCVLFKRITTVVLSPKLPENAQFTNLLVNASGSRATLVGTRMIFVVELDTDFWHRPPFDGPDCVDHLRPEYYAKCDLLHVGLFVRNFHPPFVVSVGLSLSRIFWK

SEQ ID NO: 164950 - protein, 114 aa, Heterodera glycines
VISGTTTKKNEFSLSCQFGDLSKYNSQQNLNFPRKCHFEFPNPLPKFEFPLICHFMTNHNFPHLSLVTNQKFPIKKFPPSPRLSLFKSSKFSVKKVQDNLKPFNRFWFGSPPPN

SEQ ID NO: 164951 - protein, 121 aa, Heterodera glycines
MFNLSVDSEKTLLVQQSRLPEHTELMWILGSTTTVTSLTSMSQFKDKFRGFPQGAAPLGLLAYPLLQAADVLTYRATHVPVGEDQTQHMELTRHLANKFNSRFHCNFFPVPEKVLFAKRFA

SEQ ID NO: 164952 - protein, 142 aa, Heterodera glycines
MEQQYWNGGQQTEFCTKMDTDKDMIKAIETKLIELVEHQKKEEIFIGVLKDRFGKDGQQREFYAKMNTEKDMIKAIETKIIALEEHKKNEEIFIGVLKDRFGKELLKAVHPDIRKNIVEKFSYPKQNYWDANASHNDLEVFG

SEQ ID NO: 164953 - protein, 75 aa, Heterodera glycines
LILMRGHKIINGKTMTQQNGKELKHYLNCIFSFQSLTNKLYCSDITSFRIENLRKNYLHKFFQCKNFCIFFSLVY

SEQ ID NO: 164954 - protein, 206 aa, Heterodera glycines
FSDCHMNPPPKRGKYSMIVDDDGETVGTSELLKEGWKQCDYVSNRARLRCQNVRKPENLKEYGFCEEHRGFIERIRKEGLRAKHCFDSSFNSCQNLHLTDDIDETLLPKHPADFPFVYESLYCDNRIDDNDNPLSRANVFTKREIAKQYVSALRRQDASIQQMRIIYQEKHRRTLHQIMELRGKSHLTKLNPNRDSQKIKRILAMR

SEQ ID NO: 164955 - protein, 187 aa, Heterodera glycines
AFFDDERHSTGKLCTRFATDTPNVRYVFTRLMVVISSVVTLLGAIAIGFVNGWQLALILLAIIPLILASGYFEMQQQFGKKMRDTELLEDAGKVASEAVENIRTVQSLNKQLFFHRKYASLLSAPHSANMHQVHIYGFVFAFSQSLIFFMYALAFWVGSLFVLNGIMRPASVFRVFFAIAFCGQSVG

SEQ ID NO: 164956 - protein, 152 aa, Heterodera glycines
NELMHFLMEIVKLLYTFLFILFADASRHFQLFVEQKENILDPREQHKELMEVGENGIESAKPVTEVKLNYWYDEMGRGGGRQPQNQNQFEVFQRWRSNEIPAGTGGSAVFLNYDMNRNVALGPSFSPPALWPRCQCSNSAWECSSFLSIAFH

SEQ ID NO: 164957 - protein, 42 aa, Heterodera glycines
SGNGHCHASDGSVAAARLAQVGCEIIILMKIRITTDLSRFPS

SEQ ID NO: 164958 - protein, 184 aa, Heterodera glycines
ILPSSIKPHTDLLDLDPLPLTALNNPPFQSLYNFEFFNPVQTQVFHTLYATDEYALIGAPTSSGKTLCAELAIFRLFNQKPGKKCVYIAPLKALVRERVLDWEDKFNRRLGYQIVEVSGDNTPEPHELNRASILITTPEKWDGITRCADTRHYVKQVELLVIDEIHLLGVERGAVLEAIITRIK

SEQ ID NO: 164959 - protein, 134 aa, Heterodera glycines
DFALFDRMTSFDQLMRGIRRRPNESVDELGNRISGLVRRAYPGLTEQQYDDYSIMHFIRAISNPELAITLEMTRRPGATFDEFIAQAARAEATHRLPEIRLGQIKLFNGKCRIRHIHPIMCHQTTIPVIGPDQK

SEQ ID NO: 164960 - protein, 177 aa, Heterodera glycines
SLLLLLGQLLNMFLVLDALKDMKASIKNDLSTFRRASQFFTNDSNNLIWFVATQNKIKQSLRERIQKIEAHEELLADLIYISAHFHENRMFISPDQRHTHIKVIAFCLYLMDAEVYTRLDQKKRISIQKFDKIFNSIEVVPLFGDMNILPFSFVKQCRNTGQCAKGTGQQCKCYDPA

SEQ ID NO: 164961 - protein, 182 aa, Heterodera glycines
MATAGQLLFDESGQPFIVIREQEKQKRLTGIQALKSHIIAAKHVANTLKTSLGPRGLDKMLVSSDGEVTITNDGATIMKNMDVEHHVAKLMVELSQSQDDEIGDGTTGVVVLAGALLEHAESLLDKGIHPTKIADGFELACKKAIEKVESIAQQFPIDDKKALVKSAKTSLGSKVVNQCLRQ

SEQ ID NO: 164962 - protein, 68 aa, Heterodera glycines
  unsure (1)..(68): unsure at all Xaa locations
AHRLQMLDASLRRAXRFHREIALEMPHPPSSMEILKIVTKRLKLDIHVYFAVLARLSPGYVGADLLAL

SEQ ID NO: 164963 - protein, 211 aa, Heterodera glycines
  unsure (1)..(211): unsure at all Xaa locations
SLLDPFKLFSCHFFLSPFSCANLCDCQNGARCDPRSGECRCAPGFTGPHCTQMCRAGRFGQNCKEKCQCEDPTNCDPKTGQCKCGXAPKPKRRILLRLFYVNCLCIAIPRFPYSSGWIGPTCQQQCPQGKYGFNCSMECDCHGSAGCDPTSGCCHCPKGRYGFRCQFGTFHFGLLCPFPFEISLECPPGQFGLQCAESCHCQNGASCDPVT

SEQ ID NO: 164964 - protein, 93 aa, Heterodera glycines
GHDPFHCLRCFSIAVAIWNILYCLLQFALLGWQVQVVKQWQWHWENRALFVMGAIDQYQARFPGLYAIYTETPERRRVNGEQKGKNIVNLMCH

SEQ ID NO: 164965 - protein, 142 aa, Heterodera glycines
YTGYIDMNMSFNFYQEGVALHKIAKRVQKRSDEDHVPGTTFMRDLISPGGRPVAYNVHNPDNDKWGRALEAFQAVLALEKFNNESQLELHNLATQQGDSQKGDSLEDTYLRGDGQLIEDIGSIVTYLGGVGYGSGESLSDKN

SEQ ID NO: 164966 - protein, 205 aa, Heterodera glycines
MRLHIDGLSVLFPYEYVYPEQLLYMEQLKKVLDAPGHCLLEMPSGTGKTVSLLALVVAYMRKYPERLHKLIYCSFFIPEIEKCVEELKRLFRYYTNVTGSAPDFLALTLSARKNLCINKSVVSFRYGSAVDGACQRLTASYVRAKRRLNPNLPCCSFFEKFDEKRDMTLPKGVYNLSDLRGWGKEHGMCPYFVARHLVNRADIIV

SEQ ID NO: 164967 - protein, 132 aa, Heterodera glycines
VSFVEFTQALRLGEVIGLFLALQKTDYHPKNLVMKLGVQMSLVQLVQGVHKNCRCTPAVLRNRVISSLNHVSCSRVQGGAKKQSVLFELQVSIENAVVEVLNDRWGFSARKLDIFVSVKSLWYDPVAIQSVM

SEQ ID NO: 164968 - protein, 165 aa, Heterodera glycines
MAAAASSDDNNTSLDTESITTTPPRTPRRGKQQQFNLSPATPPAKNISSNSTNGSGGGTPVPRSALRRRGSRTSPRLAPVVEKGDNEEDIAEEEEEKQQQTNEEVEQQQNTVEQTDNETKMVDEADKATTEAQKEKESEEAGGSEQKQEDEEKMELDNDNAGPDG

SEQ ID NO: 164969 - protein, 167 aa, Heterodera glycines
  unsure (1)..(167): unsure at all Xaa locations
LDYAFICRKGFTALNAMGVCDHQKRFIAFFCNYPGSCHDSYVLRYFITVDKKHCLKFQSSSQFFSRMYXGGLDGIILGDSAYPQKNWLFTPVRFPRNQKEEAYNAAHAVTRVTIEQCFGIYKNRWRCLMNKCRLQPGINLFFAFFTFKLRKIGKSSNSLQYASQHCH

SEQ ID NO: 164970 - protein, 170 aa, Heterodera glycines
MQAPQPLPNLHQIFQAVDRDRSGQISADELQRALSNGTWQPFNPETCRMMISMFDNNNDGGISFAEFQSLWNYINDWTRVFRTFDRDNSGNIDKTELTNALTQFGYRLSGPFYDMLMRKFDRTHTGHINFDDFIQLCVVLQTLTAAFREKDTDLDGWIRIRNMPFLPIIF

SEQ ID NO: 164971 - protein, 199 aa, Heterodera glycines
PVYSSKVRSFLAQVDDSEMLRPDFDLTTYINTIFPTEQSLVHLDSFVKKIDEEIANYDRELSEAVAEHGRCALEANNALLQAQTTITELEQKVQEIRDRTLCSENSVHELTKDIRQLDVAKKNLTESIATLHHLQLLLNGVNLLTQWVTERRYNEITTELPAVLNVLLLFEDYQHIEHVKQLTDKVQKIREQLTVQLAA

SEQ ID NO: 164972 - protein, 205 aa, Heterodera glycines
MRRLGDIDDSESVLLLLNSPRKRSRFPAIASGATNVTFQQHKVTREERANALGRFPGFRGCTLWFTGLSGAGKTTIAFALEKALVQLGVPAYALDGDNIRHGLCKNLGFSAEERAENIRRVAEVAKLFSDLGMVVLASFISPFRAGREEARRIHSKENIPFFEIFVDTPIEVCEARDPKKLYKKARAGKIRGFTGVDSDYEVPLQ

SEQ ID NO: 164973 - protein, 210 aa, Heterodera glycines
QTVGEMSCNPSFGGIGKGHLMREIDALDGVCPRICDQTGTHFHALNRSHGPAVIGLRALIDRKLYKKAMQAEIFHNTPNLDVLEAAVEDLLLLESTSPVASTSPSASAVPGDDGTEMATHCVKGCALANGRLIIAPTVVITTGTFLNAELVWGAQRKPGGRMGEATSSGLAGTFRRVGFRTGRLSTGTPPRLLASTIDFARFTTQPSDAV

SEQ ID NO: 164974 - protein, 79 aa, Heterodera glycines
QHLFWLKTKHFYCCSKYTTIWRNQQRTCSTSSGEKKHQILFSGQSKKPRRQNKFTEKPGLAVNCFEAESAHSKSSQRNC

SEQ ID NO: 164975 - protein, 187 aa, Heterodera glycines
MDPRHFWVQSLQHELELELNGTISYLDEASRLATEGNRTLNEIRIRLEKRDEFRRASNELDRRRRMDHLEVHKRWKQKFGELEKEMNERMASIEMEFHRRIEQLEEERKTQDAQVEREWHQKKAALESTDWLTANSQRNESDGNGQMEDIERRREEKKEQTNNEEKVEEKEKEEKKEQKSEEKVEEE

SEQ ID NO: 164976 - protein, 114 aa, Heterodera glycines
MALARRKIGISTPVQARNKDGICQSREWVGAQIFPFQSNQISLYSHFSATNSPIPFQSHHRESQHREQSLPIVIPKLENPLGFQYALEAPISTSILKEDDRMTYVNKASDLLRR

SEQ ID NO: 164977 - protein, 188 aa, Heterodera glycines
TGQARLLSFFESIGWKVYTVPETASFFLGPGRIRFPDLSSEQAAQFQTDLLKALIQNEDVFFNQAEFSEAEKIMIILDRGAMDGSAYIDMESWSDVLSACKVTNEQLRERYHQICHLVTAADGAQSFYQLANNQARTESMDEAIQLDKKTKEAWVGHEYLSIVDNSSGSFDEKISKLIADVCERFGIS

SEQ ID NO: 164978 - protein, 194 aa, Heterodera glycines
QFNSHSENIKFTFFPNCSINNFRCFGEGNLTIGTPIYCREHDCFKNNSFKQKYGTKFCFYEPYEKIYLVKSDEELIQIKAWGTTEKIFYLPNNLNQSFIENRRNKREENSSINEEATIECLKGGIIIKAINDIQELQISIENYTIIKKNPQKEEIIYLPPKLTSFEYKPVIKFISNPDKSNEKQITCQSSPVCE

SEQ ID NO: 164979 - protein, 179 aa, Heterodera glycines
FREDGDYNCCISSQFYAPEQPKRYCTTTSPDLLNSSRGHVNGLCERCNKNQQIIVERLNKFEAIDEENYFDELETYKYRLNKAYPLCRRCETYTAKKLLDVQAKFSTPKRSVKSTKTFSTKTFSIGGKTASIVGSVKRSISGSIFGDEHVSHVSSTKLKQHNHTGKRLFASGFYTNCVN

SEQ ID NO: 164980 - protein, 157 aa, Heterodera glycines; identical to SEQ ID NO: 130811

SEQ ID NO: 164981 - protein, 155 aa, Heterodera glycines
NVFGGATDGNTYSRRTTSLLLLLTILMGVSMQKPTIPQKIIEKARRIKMGKKVVITPYFPKPKSCDGPGTRTEFQTKFLFFNRTLGLLHHFPKFIQDPETRAVGKAVKRILVFEKVRKKYKYRLYCSGSICVSAFHSFDHSLFSIEFTFSSIFNT

SEQ ID NO: 164982 - protein, 72 aa, Heterodera glycines
RQFQTLETKFADELATQERFYGADGGTTAAAALMSSSTSTSSSSNGGGGICPPAVPQHQQFSLSGGSHQRHF

SEQ ID NO: 164983 - protein, 216 aa, Heterodera glycines
DRQDGERANAAQQTKTKKGMDAQGLGTSQTGVTPAASKNLRSGAITVRSARDRIERAAETLSSRIAEARELMDSDFTRGEAPEHAARLMAMERGLGQVTRIFEGHFDKGIAEAGAAPEERQDFLYDFVAAPLPASTKYLQLREHPTPAELLQIAAEHLGDLQAMRQTFEDEEREQSISRSSRSVDTEDSHLSKELPRTMARRSMPEWETSFRDALA

SEQ ID NO: 164984 - protein, 105 aa, Heterodera glycines
LKNPTKSGTYSPNRANAGFSTQNNILNSQSVSSGSFFILEPIFFAKFKHLIMTTYFRLARVGRAHRQLAAPAMVPAVPLMAHPRWMSVTLLAVVLTELAAESLTH

SEQ ID NO: 164985 - protein, 148 aa, Heterodera glycines
  unsure (1)..(148): unsure at all Xaa locations
TAAAKLNRFFRRLVHVRQIYFEFAAWQMLYLLVNPQKVYRNFMYRKKAKDQWARDDPDFLLLLALSLLGSSVLFALPLNLSFSSFCAFFLWVVFIDCIRIGIANATALWFNSNHFLRRTTDCDVIERAYCFHVDLNVFFXLLILLHVI

SEQ ID NO: 164986 - protein, 207 aa, Heterodera glycines
IGGVPKVISKCLKDGSLPFFALGSRVPQQCATERDDECPEEYECSLATDDNYYCCPAWDRCPPGASPFLVEGSRKLLGCNWMANNCPDGYTCEGSKDRAICCRTRASQLQCPHERAPYLYGKRPLACPKGSKRSCPSGYECTASKNGPNQHLCCSVVDHHLPECVSGFAFVDPMNGKNRICDPSSESCPVGYRCKRSTLANTHVCCS

SEQ ID NO: 164987 - protein, 146 aa, Heterodera glycines
ACELLDGRYVDAKLRAMAVHHLDNALNDDQLQLYLLILVQAIRFEPHAFSPLVRLLLMRALMDYRVGHTLFWLLRAELAHLLAVDQSKTTLFSRYALLLEAYCRGNSVHLHSMIKQVEMVSTLTALSSLVRACGNKEMGTKVNKMK

SEQ ID NO: 164988 - protein, 166 aa, Heterodera glycines
  unsure (1)..(166): unsure at all Xaa locations
MFLGIDLGTSAVKVLLISADQSVVGSASVPLKVSRPFDGWFXQCPSDWHRATREVIDQLRHSNPKAFCALRGIGLSCQMHGAVLLDAAGVTLRPCILWNDMLSHREADELNADARFRSITGNAVFPGFTAPKLAWVRPNEPEIFAKIAKVLLPNDYLRFWLTGAYF

SEQ ID NO: 164989 - protein, 133 aa, Heterodera glycines
EAAFKDIDYSFLVGAMPHKEWMERKDLLAANVRIVKSHGEALARFSKPTVKVLVVGNPANTNALICAKYTASKIPAKNFSGMTRRDHDRAMAQVAHKCAYGTTVGMVNNVIIWGHHSSTQFPDIPHATIADGG

SEQ ID NO: 164990 - protein, 91 aa, Heterodera glycines
ELGKMLGLGWESNPLVHPFHGQALPLSYRGTSALSFMDYQARFPRFNRPASFFFQSYRMILRMFNLDASRRSFEALKLSFYFVVMFIFMIV

SEQ ID NO: 164991 - protein, 95 aa, Heterodera glycines
KSAENCLNNLLQQNVRQPKRSRIKNGKSNVKLKCQFSISILNFIFLFFSFISGDGWLCVFDLLEPSQLGLGIALVSNRFDCYVDEHFKTRRWALK

SEQ ID NO: 164992 - protein, 198 aa, Heterodera glycines
NIRQQIFHPIPLNAHRINQVSVNAQRNIDVQYVPNNCVNAPPNVQRHCDIQYTAPNPVAAPSNAQQIYFGSRLIQNIPMQAQLWQGPDGKMILVYPQDQQQQVLIEQPNLAQNHQKFTRQVFQIPETNQEPRHFPTYPQPNVAPSNLEFNLILERIPDLNGNEGTDSVRRFFKKFDAYTDGWPNAKRISALESKVYNK

SEQ ID NO: 164993 - protein, 162 aa, Heterodera glycines
MNRSEYYQKFLEKMWFEFWHKSASFNHTAHFFRVGRELGVPFTEMDDIVMRIEERTNKEDFSMRHMQLLFDDRIVAVPWLRIDSVPGHQKLFAFTEILRLEMLDEMIAQPCYNPLNHNVDNPLYFPPDYEESEEMEEGAEDENIAKIERRWIKRKKRMAITH

SEQ ID NO: 164994 - protein, 133 aa, Heterodera glycines
MHVIYFDDLLPRAPMWLIQLPFYITSFLVLLVFMLCPGNMFLYTLIAVAYPMYASLLTLNTQNTSEYTQWLVYWCVFAVLGQLDFLFGSINGLLLLYVPLKTVFLLSLAFPQIYGAHNIYVKPDVLDKMKKML

SEQ ID NO: 164995 - protein, 77 aa, Heterodera glycines
  unsure (1)..(77): unsure at all Xaa locations
IKRRFSPEAVDTIFQTDETGTIDWIPMLIRVQCWRXLVFELAEQFPHCLMLTFAITLISDACFPHNSSNVNTAAQQL

SEQ ID NO: 164996 - protein, 217 aa, Heterodera glycines
QLPTNVWCTPSAIGRMATILRQMHAVVSEEMGRELMGRQRLMDHLCLVHGYFFMLRGDFASALEHILFIKTAKTTATKKCATPFSSRKNVSHSTKIAEKCVNDALAMCSPPANVANLMHLLCGVKLTKREQMKCKIFSEKFMLKSRLREGQRNEFQAVAEFFSTNALRAYKRVFGFVSNLQLQRAQLDYTGQNLLRVVRQRLATRSEYRSSFYSMLI

SEQ ID NO: 164997 - protein, 66 aa, Heterodera glycines
FSSPFVSLIRPLICGIKLYTTKMVICLVHFCEWPPPRCVVNSSSFSASSHHIFNYNYHNRFFLSHS

SEQ ID NO: 164998 - protein, 199 aa, Heterodera glycines
  unsure (1)..(199): unsure at all Xaa locations
VLLLNFAFIFFAFLSSIYAEEEDPKVTHKAFFDISIGGVKKGRIVIGLFGEVVPKTAKNFLELAKGTHGYGYKDSKFHRVIRNFMIQGGDFTRGDGTGGKSIFEGKSFEDENFKLHHYGAGWLSMANAGPDTNGSQFFITTVHTPWLDGRHVVFGKVLEGMNIVREIEDGETAGGDRPXKDVVIVDSGELTVSEPFKVA

SEQ ID NO: 164999 - protein, 126 aa, Heterodera glycines
  unsure (1)..(126): unsure at all Xaa locations
IENIGVVGTGLTGSGIVQIGVESAVQTCLMGRTQXKCDQTRLNINTGVQKLIHKRMANDTAEAQQQVGPATMESLELANNLDEVDLPDADIDIEALVEHLKVKQKMLTELEANVSENCLLGTNTST

SEQ ID NO: 165000 - protein, 163 aa, Heterodera glycines
  unsure (1)..(163): unsure at all Xaa locations
MNFSPITLFLLSSLAIFYAAVAFRQQTVAVRGRLMCGDKPLTDTKVKLWNKNKIGRDDQLADVKTDAQGNFALDGGVGSIFGMNVHLKSWALHFCKCEIRANPXHFLPVYHDCDRGILPCQRKVNLGIPGEYVTRTSTVQRWLDAGTMNMQLKFHDESTSCIN

SEQ ID NO: 165001 - protein, 210 aa, Heterodera glycines
IVCCLNMNRRRKFAPVPNMVAAQQQQPQQPIKTERAPEPTGGETVPPELDQQLQALQAVTNVGGTSGSGQQVGAVSTAAQPQKQGPSSASSAPTAAAGPLIGAVPFKTAALALATSAASVLPPVASLLNRSPPSSPPLQLFAETDPMLCGGGGVRQHLYIDRHLQPRAYTPEALAALDNAVLTAAGHQRDAAAVVAQHQQLLQGQGQLGA

SEQ ID NO: 165002 - protein, 82 aa, Heterodera glycines
  unsure (1)..(82): unsure at all Xaa locations
QSEWPIXHSFFVSEFFDPSQTTVLFLGPVGDQKVSDYGEEEHPPVGQLLFDRLNKRIKEKALPYFLFNRSNANVIPTVSLKQ

SEQ ID NO: 165003 - protein, 206 aa, Heterodera glycines
PIKVNFTDIDYEVFTEAALLAREGHSPYEQPEYRYTPLIAWLLVPNGQFADFGKLVFCAIDVLVAFLHLLILESRQQNQRNPSSQNEGKTIHSSSVVFRHFGVLFWLFNPFTAIISARGNCDAIICALVLLALFLLIRVWQRKNDGITATFLRLALAAVVHGAGATHFRIFPLIYLPSIFLSFAHSSQNHQRRLTKCNDFKSFIWM

SEQ ID NO: 165004 - protein, 199 aa, Heterodera glycines
MTTAQLTHLDLSQAKFGSSDTLLRLLIRCESLQALSLESCELLDEECCRAIANNSALRHLDLVYAKRLTAAGVEVILRACQKLVELNLSWAEVDVDAMLAVCRLMPSGVRRLNLSGFRQLSSLNDRSVAQLCEVCPHLVELDLSDNALLTENCLDSICNRLKYLRRLTLSRCYGIEPMAFLQLNTLDELNIFGCITNDG

SEQ ID NO: 165005 - protein, 112 aa, Heterodera glycines
IKKHRDYYEKGTKFVADFGEWAGGNKQKKGNKNVPKHKLMINQINRSSSLSGSANDDWEEREKSHQVSSVGTEEGGNGAVVDEGGEEQIAKCCGQTTTDDEDEERRNERRQS

SEQ ID NO: 165006 - protein, 81 aa, Heterodera glycines
FFYYELSFPFPLFLLWNYIGLSLPIFIFLTNSSSVINLFLIQLIVHVFPCVHLRFCLGSSLLTDFLSFFPSFSSFLFEHLS

SEQ ID NO: 165007 - protein, 69 aa, Heterodera glycines
VLWIASACSLLPIIATVATLPSLYSEMSNMNSKVCDVLDAFLVNTDSAWTDLMDAQAAADAPAQLRREP

SEQ ID NO: 165008 - protein, 213 aa, Heterodera glycines
KFETMTGMRILERYGMTETLVSTSNPYEPINARTSGSVGQPVKGVQARINVDGVIEVKSPSLFNGYLNLPEKTKQEFTADGFFITGDMGEIDQNGFVWIKGRQKDLIITGGLNVYPPEVEDVVTNIFGEKLKECAIIGVPHPDFGEAVVAVCEPSDAFAEKLSGVAHQLTDDEKSAFRQTLAPYKIPKAVQYMPLPRNHLGKVQKNVLRAMPE

SEQ ID NO: 165009 - protein, 195 aa, Heterodera glycines
KSVATATRVANLFRYRHLPYLYSLHFRASLYGGTVIRPLFFEFPSDTNTHTLNFQFMWGPAMVIVPVVNPNVDSVHGYLPVNETWYSMSEAHEYSARIMPGFSTFKAPRDTPLPTFLRGGHIIPRQEPDLTTTASRKKPFQLLIGLKPLACPCKLVAAGEMFWDDGETIVDDFGNHSYYRFEFSTTRTAHWTPLL

SEQ ID NO: 165010 - protein, 127 aa, Heterodera glycines
ISIGRKTAEYSLHSHTTDGTDFGASLYHRVHQNLEYGVQMGWKMGDAMASWAIATKYNMSPELTLRAKMDHNSLVSVSAVHNLNGTLKLTLSSHFAMAAFPDAQNKFGFGLEYCPGGTCCAKDKEDA

SEQ ID NO: 165011 - protein, 194 aa, Heterodera glycines
DLLTKQLTAVEECKSVTATYKPIRVSDMPIQLCEHGRVMPGPFIRGEIKAVNTSAARRLIREFNVNTTLYTGANICVNCCSRLRDHQETRRRGRTEAILYYPEGATLFIKLNGDENDGNTTKGKKTTTGPSAAVTRRAASKGLIKIRICSDETINALKLRIYEKIDQSPVDQLLYMGGQVLDGNLTLERARVPA

SEQ ID NO: 165012 - protein, 195 aa, Heterodera glycines
HPRADGNLQWYKERMSAEEFDDQTDLPELQNEYKRYKDIPERDSFESLCRGEFEIPPENVTQLNCYYKKDKPFLKLAPHKVEIVRFEPLVVLFRGVISDAEISVIKELATPKLRRATVHDPATGQLVFASYRISKSAWLKDEEHEVVARVNKRISDMTNLNLDTAEELQVANYGIGGHYDPHFDFSRREEKNQFD

SEQ ID NO: 165013 - protein, 203 aa, Heterodera glycines
MQSLSHILFTFFSILFAAHCQSDESKSAGAQMQTVDENKIRHGKPLTSIVKYPFMATVWQNDRKLCTASIVSPNYILSAGHCFVKMSEENYIILVGTVNAKLEKGNGQQFKVEKAHVYSETVFGQDIAIVKLKNSIDFSDNATQPITLSRRSNFTKTDLAFIAGWGRITDWSSPVTLQGANVLIWPKDEARCDGIMESEVCAF

SEQ ID NO: 165014 - protein, 195 aa, Heterodera glycines
MFPAKYKAFRLENKVAVITAATNGIGLAIAERLGHEGARLVVSSRDEDNVKRAIDRLVSSGLKRSDLAGCTCHVSNSEDRSRLLKLTIQRFGSDLLDVDESAWDKLFDVNVKAGFMMAKLFAPEIEQSGGGSIVFNSSIGAYRSPQGIAAYGITKTALLGLTRALAESLAPKGIRVNAIAPGIIKTKMSKALWEG

SEQ ID NO: 165015 - protein, 197 aa, Heterodera glycines
  unsure (1)..(197): unsure at all Xaa locations
VLGIATKGSLLAMITSPDSLPSLYSEMIPMNRQGRHGFEVFHVISDSAWTDLMDGLMAMTAPSKPRDNPFNSMYRDEHXLPGHCRRAVLRHANCPPVAPGPAAPAVHPGHPGCAXPPGEPVYGVQTWPPCPLHNIPCPRYPAGPTRRPQGLAPPGLLXSAGPPGTPCSRRMTLQLLVTPGPQRQPGQCRHPGSAGQP

SEQ ID NO: 165016 - protein, 102 aa, Heterodera glycines
LKQRFLFFWDRVYHFSLQISQFSDGLRPKLGGNGRAEFLGNLGKVRGALFVQLSLRLGPDFLRLALGRQVEFLDGVTVSGGRAPIVAPTRRQVPGRVENARH

SEQ ID NO: 165017 - protein, 109 aa, Heterodera glycines
GNFSSRIEALKAAFANASSPVNFIVVIWQLPSPVDPNLAFDRINELTREQLTLKRMNGVGHYFLIRCPIARDESKWTKWEEEAIGWRIYDQWNIIDIRINDEGEIGDGP

SEQ ID NO: 165018 - protein, 129 aa, Heterodera glycines
GGRVEYRIKWMGYDDSWNSWEPSKSVKHLDVVKQYEKEWKQQHQQEKQQPVSAKRSLRLSRTEQTPTTKGTTPSSSVSVSTKRIRVVVRKEQDDGPAHVEQTEMDAVSVETKELAPKTPSKKKKKRSRY

SEQ ID NO: 165019 - protein, 71 aa, Heterodera glycines
YCKDCDIIFNRSSSNDASANKFNILKNGTIQSPPDPTEISVYLDKYVVGQQHAKKAMSVGIYQHYKRLENN

SEQ ID NO: 165020 - protein, 110 aa, Heterodera glycines
IHPLRDVNLDFGKAVREDARPGIDIQAQCRVRILDRPASYLMNAPEVLYPWVSIIDASMKLAICNLVLDTTTRPNFVADYLLYFMNRYRDFSYVDFITITEPSYDIQQVL

SEQ ID NO: 165021 - protein, 168 aa, Heterodera glycines
TVVMLFWGLYLMDPATVTRKEARFIFDFKWFNYALVGGRIDLLQKSTCFFYSRINVPVESKKFIRKKNLNFIFIGTPILQYYHFFSEISCVLFSFLVILPLLVNPSISAHFPPLRHASRLFHLAPSSPLKSLCAKGDLVFLPVLHHPHPLFLCLLQLLGLSHPCPNVL

SEQ ID NO: 165022 - protein, 116 aa, Heterodera glycines
LFNTLIKSPCFNEHECCAKWAADGQCESNSEYMSQFCKASCKKCQYSYNMQEECADRHKNCKALSYQMKCDSSWMAENCRKYCNKCNVKRMQTCAGGSPGGEKRKKNSEINFINFY

SEQ ID NO: 165023 - protein, 181 aa, Heterodera glycines
  unsure (1)..(181): unsure at all Xaa locations
LQQDMTILPHNYNFDIPNTIWKIRTIDAKIVALQFPEGITMYACVIADILEKHTGAEFIILGDVTYGACXVHDFTARALGLSAXLVHYGHSXLVPIHDTVGIHLLYVLANIDMGTAHLLDTLGHNFLHTAGDGMEKVPKLALNSTVQFVATLQIVKRELAKDSFYIVIPQCSPMSTGELLG

SEQ ID NO: 165024 - protein, 86 aa, Heterodera glycines
QIVLRQHVACRSPAAIPTSNETHDAPSKRYGGCCCGCGVSAPGPPGPPGPSVQPDRHRQPVGSRQPGVPGQAAPRPYPSRRGCMPK

SEQ ID NO: 165025 - protein, 189 aa, Heterodera glycines
MSSFFHGHQRTHSQAQQLIPRGPSDPDDPCSTASPYDSDPVLIPSCAFPSGTDRLPQLTNSRILPAGRASAMRFSTLGSDCSSSYYGLPGGVEGVEEPITTRSVLRANFRVVLGSAALALLGSVLLVFGSCVMLFPNDMDVHGWIFLVVGVLFAIPGFYHVWYIGCTLCGRPGYSFENLPTFTKPNFPY

SEQ ID NO: 165026 - protein, 180 aa, Heterodera glycines
MVEDAGTRAGFDQIDALAREAEELRQKLEQERHKLNDIPIQQAAERLELLSQLAIKQRRVLKGHGSKVLCMDWAQDKRHLVSSSQDGKVIVWDGFTTNKEHALTMPTTWVMACAYAPSGQMIACGGLDNKCSVVPLDPQEDILQKKRSVATHTSYMSCCTFIRSDNLLLTGSGDSTCAMW

SEQ ID NO: 165027 - protein, 213 aa, Heterodera glycines
FFTLKLITMMLRNRDLNVQPAAGAGAPLPKRQSAHLVKVVGGASGRASSQSSAGSDRDSKYEPRPKRACSQKDKENSHYNNNNHNKSSHNKSKKNTSGGTVVPVTAFSRSLLIDSAKKDVTVVSTAVDAGGGGVLAAPIVGRKRSSALLSTRDSNVGEHMSSTQKEEKQDDEQKMEQDSGERQQQQEEGLFDFDKENDRDMSALSQYAQDIFT

SEQ ID NO: 165028 - protein, 169 aa, Heterodera glycines
AMSTAQGDHDERRDASSPPPPPLAASIRPNAMAASSSRIGHSLLGEGALRPSPFSQLATSSFIQPSPLAAIVQPRAIQESNFRALEMSMHALLINQMLFANSFASPALRSSRHRPFGYGSIPFGSVSRRGPVDSIVDSNIFGVPAGASQIQLMDELENEFDPLSNNRRV

SEQ ID NO: 165029 - protein, 205 aa, Heterodera glycines
CAQFGTSVTSFLQIDTTDPIALSELRFDVLPLLLANAWPLRRNIHFLRRLVFILAYSSNLNYHLVLDPLLMGLSKCSTRENVFLCCSPENVTITDVKIFLVQLSSYMKLCKLYDEGVFVFPWIFHCAPNVQQQQFWSYINSLLDGKQESESLPTLVSITTRIAQKWSNEAMSKKLEDINSLMTRLTLHNRSLAKLFALNQTGSLF

SEQ ID NO: 165030 - protein, 147 aa, Heterodera glycines
MGQFIQEIQQNNGTKSGENVTNEERHENQSKRQENGAVLVEQQQENAIEQSAKLQKERNVDEQKKRDDQFGQQNGTVQEALDDQTDELQLVMSMSRVIRKPMRQLNIKPIENGTELQHGPGVIYYHACLRDNDGIEKDVILNCMQPL

SEQ ID NO: 165031 - protein, 141 aa, Heterodera glycines
MFLFLPPSLPSRLCLPFLFLLFYAYFGDGFRRRWRDDSFINRTFKPRRYKLTLSIRNHNVTDVRFFRLIGVDNTADFYVAPGDTFTNTYTVNRKGAWVLFVEFPGNRYAKSQRKMISRDSFPQWMMEVYLFPPDNVGFSEW

SEQ ID NO: 165032 - protein, 82 aa, Heterodera glycines
ILTRQILLTSCGSYGDVLQLRSILELRISHFQFFYQRAMSLDHCGEMLSRTLYSRPLFPYFTVTIICGITMDGRDDLYSYDP

SEQ ID NO: 165033 - protein, 102 aa, Heterodera glycines
  unsure (1)..(102): unsure at all Xaa locations
GWNDLRDAKLVLTLPAKHPVTTYLSNFRAKRQLPGLXRSPGLLHPRCPPDPLGSAGTPAQPGHPXSHDSPDLSYXPRQFDDPCTRQNIPCTACNAGPHGPLG

SEQ ID NO: 165034 - protein, 108 aa, Heterodera glycines
QETHIVLGIASESSLMDIIATDGTQASLYSEMTQMNNKVRDGVEAFRVNTDSACTDLMDVQVDVTPPSNPRDNPFNSIFRAKRQLPGHCQCAGLQQPSCPPGPPGPCG

SEQ ID NO: 165035 - protein, 137 aa, Heterodera glycines
MSDMSAYMGSGPAEPAPSSGAAEASPSSGVASAYMGSGPAEPAPSSGAAEASPSSGVASAYMGSGPAEPAPSSGAAEASPSSGVASAYMGSGPAEPAPSSGAAEASPSSGVASAYMGASPAYEPPAQEKSPDQSAYM

SEQ ID NO: 165036 - protein, 183 aa, Heterodera glycines
  unsure (1)..(183): unsure at all Xaa locations
MADDIPPPPAVAADGGDVVVDLEQHVRQLIMSIGQGSEDAVHELSILIESFNQEQLVDFLEIMARMYVESGFSVDMPGGQEGITMLMVAASSGRVDFARYLLAHGATVGHLDATGSVFPLMLAAESGXLEVCRLLVEEWAAEVNQQAIDGTTPLMSASSEGRLDVVIYLIDHGAEIQHANAEG

SEQ ID NO: 165037 - protein, 175 aa, Heterodera glycines
LSESNERLQIHLKERMQAQIDKNKLMQRLDQAKKIFDQTERFKERLLRENDDLRNDPGKVQTLGEQEWKRIQQANVLASIQQAFSTSSSMLNVNEAPPPALDQSTTDPLDAINNEIRMIQEQKQQAERVAAEQSQEWPPNGTVYEYGNNNNASNGGYSPRQQHDQQKKQKMRSHK

SEQ ID NO: 165038 - protein, 198 aa, Heterodera glycines
HLPIFFLFLSVRLPFLFSYPQFPSPFAHPPMSPMAGIEPIMPTNFALDGFARHVSPSGGFGGGATTHPMNSLIIRNSPYQMPMPTMPGGASPFPMSQQMGTDGPQQPIFPNGMSIDKNGMGSANAVLPSDIPMDVLVGRQITQNRLDEMGQSVVGSAAMNGRHPFPLGPFLGGSNGGGGRNAPPFGAGGGAFSGDSLT

SEQ ID NO: 165039 - protein, 174 aa, Heterodera glycines
MLGRNIGNGRGRPLGSAHKAVGKAVDGSSSGDSSDDDSSIDQHVQLASESRDVKLNGGGESTIMKGTGRRGRRKGRTRDESSPDLATTTVAEDWTGGNGDPELCAHKKCQRPLHMSINWVQCDDCDKWFHSTCVFGTNSTPEDDADFHCGCERNTKKNSTETTHRKSLSLSPPT

SEQ ID NO: 165040 - protein, 180 aa, Heterodera glycines
MQLAYRSRYHEQNLNPKWKPFEILTQQLCYGDRDRPFLIECFDWDQDGDHDLVGACQTTVNRLMCGMDKELPLINEKKLKKHKKYVDSGQIHFHRVFLWQDYTFLDFIRGGTELDFTVAIDFTRSNLPMKDQSSLHRFDHSNRPNQYEIAIGAIAEICQHYSKNKLFNAYGFGARIPSLD

SEQ ID NO: 165041 - protein, 108 aa, Heterodera glycines
NANNLSLISLGSFSLIATVKMELSPKLCQKIKGLMETRRIACVVPVPVFSCTFVQKKKQVHAIFGTQITGTVTGTRQLGARTFSNIAFLFVIQIQQSWYHSKVINMLS

SEQ ID NO: 165042 - protein, 201 aa, Heterodera glycines
RLISLGAPKDQNESHFSDEEELPDVPFNGARDKACYAATRLTDNEIKNTKQARITHRVKDTSLFPLYEVSGVIQDFETTATPADYDFALGDEHIVWPSENMRQNGYADFVAETNLALLVKSADTLTMHVAPNLPADATWALSASDHARSAVEAIAGTNGCYLILPVGAGGLALWIPTLAEHTPTARHEKRIKLIDAHSKEN

SEQ ID NO: 165043 - protein, 202 aa, Heterodera glycines
QIDTDENGGKGGRSAIEQSQKRAKMGSESNGQIKEEDKSEKSASEGTLAEEKANANGSVGNAFLDEVIRNYMPKPHAPIQCIAMEDAHFALNTTPISSNSPSKSPVRTGNDRLLEESIALMMPHPNRKREGKAFARPKDQQKFGQKMDDLLTADEEEEEAVLEQQQKVTAELPADVNAEFAAHWMVVECGTTKSPKTDDEER

SEQ ID NO: 165044 - protein, 213 aa, Heterodera glycines
QSFWRLINKPRIDDWSPLAKFYYADDTLNAIANELDSFDGRRDPERCNQLVNKLRQAQDRVLHIISEMLMLIFPLESERATRDFRVKFPDEIMHDNLPGQLWFGAECLAAGSNIDDHETESEAIQPMAKSFTRHLEKLREMLKEQALKDPTYYPDGIKTSLKVFDQLFADFEFAYVSAMVPGKSAKEYDRQLDVTVLFSECLTRAIKMRYITR

SEQ ID NO: 165045 - protein, 214 aa, Heterodera glycines
SGTRNLRDNLADLNAQIAANQKGIGLLHELVREYSLPIVKAYMKHIQRNAVEAVRQLLKNVAEESQQKGQKVLRAKDWMDDGTEIKLEVEIDRDSGDALFDFTGTGLQVHSSCNAPPAVLMAALIYCLRCLVGRDIPLNQGCLEPVKVRVPPGTILSPSENAAVVGGNVLTSQRLCDVILRAFNAVAASQGCMNNVTFGDSQFGYYETIGRGAG

SEQ ID NO: 165046 - protein, 191 aa, Heterodera glycines
MEAPSSLNDLNKFPTVSDNRKLNENTEEPSEWNKCIELLDRKKETDEKISQQVTLVANLGKAFDEGIQQNEGEEQREEKEKEEVEKEEEKEQTPTHSQFEFGMDSKRKHSSARHQQTNPKNNANSTRARRSKRLYSPSPPPSLISETNRKKKKENSADEVGDFSLGSLPNAPSSSLLKWAKCLRRRLRFSR

SEQ ID NO: 165047 - protein, 108 aa, Heterodera glycines
KYGLNEGKKREFLSASAAAGVSVAFGAPIGGVMFSLEEASYYFPLKTMWRSFFCALVAGVILRFVNPFGSDQTSLFHVDYSMRWTFMELIPFAMLGIFGGVLGSLFIW

SEQ ID NO: 165048 - protein, 160 aa, Heterodera glycines
MSVISGSISGISDRSRRQMPASSSGTVNSVGNQTAMSASNALWKAPDGTVGGNGSSIGTAGGPGPSSVLAGSNAKVGGQSANGETGALSLGGTRSESFGSSSSMLNGNQTASQSGTSSSNAVGTGDVFVYSVGNGNLTNSAQSAVPKVAAAGMGGATGNQ

SEQ ID NO: 165049 - protein, 122 aa, Heterodera glycines
  unsure (1)..(122): unsure at all Xaa locations
EFDEKTSSQYFKKATELAGLYSDIRGIRGDGNCFYRDELTAQLERXFEDAEELKRFNELVKGWRARLMTDSCFHELTTGDFCHSMEQLMTSLLNGTMLPQILLDDLNKDGIADYYVVFIRLM

SEQ ID NO: 165050 - protein, 178 aa, Heterodera glycines
  unsure (1)..(178): unsure at all Xaa locations
FGRLFFSRKVPAFLRTIMPRGSTXLHERSWNAFPYCKTEVTNPDYMKDDFLIRIETMHLSDRGTTKNXYGWNDHHHHKDVLKERKVVRINIANDNEFLRAADILDNTRPSTFRSMKTGRGPLKQQWQTNCKPVMCAYKVVTVKFKWFGLQTMVESSMQKSFPRLFCKFNREVFCWMDR

SEQ ID NO: 165051 - protein, 54 aa, Heterodera glycines
FYFADVCAGPGGFSEYMLWRKAFYNAKGFGFTLTGKDDFKLERFKAASSDYFET

SEQ ID NO: 165052 - protein, 65 aa, Heterodera glycines
IEFIEGFMRTKVRRNAGNSQGKSLKISIVFYKHRKVAKIIEDSANRREKEAPVGGESAELQGKVA

SEQ ID NO: 165053 - protein, 89 aa, Heterodera glycines
FFLNFCGVGPKGHAFLKLAKFFAIKKQNAKHEMINIPPDPTQAQQKDNIFSIVGRQALNRPAFTDTPFWRFVLPKISAHFMVFQLTFFH

SEQ ID NO: 165054 - protein, 36 aa, Heterodera glycines; identical to SEQ ID NO: 143266

SEQ ID NO: 165055 - protein, 112 aa, Heterodera glycines; identical to SEQ ID NO: 152812

SEQ ID NO: 165056 - protein, 211 aa, Heterodera glycines
WRYSVGRARELYSEMTSIGLIPFEEVFNSLLSAQIPFNSSSSSFDVTHWLHEMSRLGVRPSVKTFNAALSSLLQIKEKGANSFDYGTEEMAAAVTPSTEESSYDKEHLWKTASDLVHEMRSLGIEPTLATFSYTLKLAPTKMSLDALLNEILTRLEYKLSRSEPIERVGDDDAIFYRNAISMARILNNELQMDRLVKIYRSEHNKVFFENY

SEQ ID NO: 165057 - protein, 195 aa, Heterodera glycines
EGKNSGVVYSEMQARDSEMDSMLDKKRKELFYPAGSSYGAMTGGTLSDIRELCSLERVRNFHKNFYHLSNMYITVCGKIDHQQLLNAIEPIEQENLDAIPRQFATPFQARTPPLTEPRTARIVCPSDDESIGMVEMSWHGPPGFDFKTTQALTILFDYLTDTAVAPLRKDFVQIEDPFCTSVSFCLMEQRDCEIV

SEQ ID NO: 165058 - protein, 123 aa, Heterodera glycines
PISRIPSLICLLKQCTHSPAAVSPPCHCFLRANSFEFTPQPMANALALCRVLWPILFASSFAQSNTSPSNFPPNSLQNHNKVNDCVYNSSHRKSVLTDIMKGYDKTVVPSNESVTVQVELTVQ

SEQ ID NO: 165059 - protein, 107 aa, Heterodera glycines
GGPDPIIRGMMSQQLKRPQRLTRTITEQMFGTTDLGTINIQRGRDHGVPSYMRFRQLCGLSTATTFDQLSREIMSVEARQNLQRIYGTPGWYCSLTYCQCVHLFDLF

SEQ ID NO: 165060 - protein, 127 aa, Heterodera glycines
MRRHRQEGPILAPCRDGGGKAGGSVCDDLCRQRIAEEGNISQRISSGRSAGDRSKHSSTSSWPDELSAPTGADQQLDIGTGHVLLAFLKEHMEKPGEVSKEWESVKDYANAAGEATVARRAENAAKN

SEQ ID NO: 165061 - protein, 166 aa, Heterodera glycines
MSDCQCHQRGSIHLIIGPMFSGKTTELFRLAQRYILAGRKVAVVKYALDTRYDESHACTHDKRKMEAISATKMEDAFEELNKFDVIGIDEGQFFKDIVKYAQELANTGKTVIIAALNGDYRQEPFQNVAMLIPLAEKIEKLSAVCRCGQSASFTFRMSECTKHVIL

SEQ ID NO: 165062 - protein, 220 aa, Heterodera glycines
GFMPLELYQEVEKNANQLPKYQRTDYLCRRCYLLKEHNFLLNLNVSPVDYESMMGHLKMVHEALILLIVDMTDMEASINRQLPSIIGTKKPMIVVGNKIDLLPPDFHKGYLRHFLASLKAAMHKAGVAQQFNILKYLLLSAKTGFGVEDLITNIYQKWVSPRGSIRSDIYVVGSTNAGKSTLFNAFLQSDLCKVRAMDLVERVTTSIWPGTTSSLLKFPI

SEQ ID NO: 165063 - protein, 152 aa, Heterodera glycines
SNYGAMSPTKSVQEVQPVALSWFFLTVIHAKSGRKILDNVSGMDDAGQLVALMGASGAGKTTLLNTLLNRYLKSLSVEGQVLVNGHFLGRSITYVRGYVQQDDLFMGTLTVKEHLMRQGQLRMDGHFKLSMRKRVDEIIDEPGLPKCPPGRI

SEQ ID NO: 165064 - protein, 161 aa, Heterodera glycines
  unsure (1)..(161): unsure at all Xaa locations
MHKAFTDGVPFPVLKALEYFSMGQQSFAXGRQFRNAGNFTGTMLWAAFFVWLVQCLLLLFLPHHFAKAGIFCGLLTLLADVLFLVFCPSDLLIPFPSADAPASIAFLHFRLGACFWMSIAAAILELLFSATLCSLQSLRLYSLNTVLSASLDNSVGPPKCR

SEQ ID NO: 165065 - protein, 38 aa, Heterodera glycines
TPTRSGRLLADSKRLRDINISKDQMLDVRKDVGEPVTD

SEQ ID NO: 165066 - protein, 85 aa, Heterodera glycines
MTALCLQSFSLSLFTSHTLKCLALSFSLILFFRSISFSSSLSLSLSSSVFRFRLPEEMPILTNHGGRHNKARHNQNSNHQNNGHQ

SEQ ID NO: 165067 - protein, 191 aa, Heterodera glycines
AKWREICQLPAAFDLLNFLASETVQLRWKSDGLLANKLAMENGAILFAVKNTPFVVDPSGTVCTFLANHFKGNSTEILRANQTDLMTKIELGVRFGKTLIIDEIDERIEPALVPLLRRDFHTIGARLAVQLGEKQVDFNDQFRLFLCSRNEHCHLASHVSAVVSEINFSVTRSGLASQFLSLAIELEKPEL

SEQ ID NO: 165068 - protein, 207 aa, Heterodera glycines
ERDDETDTHRKRKIEDEEIDPLQNQSLTKKARIEALEEAARQRDDGKEEKEERTGQEFLEMYSVNYREKLNEVRLELIRDLFNIQDHMKKYQGVTDGRTIQELNETALKMRTAMKHRRKNLNDINKAVLKKDLQISAEEYERTSYEQNKDYVEPFFDSHPTDYWEHIHKKYEGLQDDYKKIRELRKQQQFLNDEQKKQSIQDEIDQL

SEQ ID NO: 165069 - protein, 63 aa, Heterodera glycines
WTKEMLAKETEFDPFGRRVKHRHGIIGGFLYIRQNCSIIVIFRCGNYTFFAFLRIKQFPLINR

SEQ ID NO: 165070 - protein, 193 aa, Heterodera glycines
LLEKHDFDAALKHYEQILATNEHSPRALFGRGRLHQLKAEFGAEHDDDSEKFIKMALSDYNSLLENEDTPNELFKMTVQYFVECARQMGGYHHKILQAQRALVDRFPDDADIKCDFGATWLGMARPEKAADIFRNVLDNEPGHALALAYLGYIQKVHEDELERRVHALRRAMATGDERVTGDARIYFPLGDGI

SEQ ID NO: 165071 - protein, 205 aa, Heterodera glycines
YISQSKLDDTLDVLLSDMGTIIKEKLLSIMDLTLGRLARYDEGNPIGALLSMASTKPNTLFNKMRNLVGEQSSNMLGNIAGCCGGAGTQLSSQHRPSTAQFHHFNAGASAGGGTAAGANNSAQLGQQYVNFLRASSEQLQQVIADEVWVNRLLEEWYDGQTQMLNEWLTERLQQSLSNTQLTSLLLIVKKIYSDFELHGIDEERL

SEQ ID NO: 165072 - protein, 207 aa, Heterodera glycines
MATDGVEEVHIEPKGLLGLLGVPPGARAIVVFAHGSGSGRLSPRNTHVASELRRSGLATFLLDLLTPEEEADRRNVFDFPLLAKRLQLASEWLRSRPNTATLSQGYFGASTGAGAALTAAAALTDTSTPIGAVVSRGGRPDLAMNVLDRVCAPTLLLVGGLDGQVIGMNERALNALVNCKHKKLHIVPGATHLFEEPGTMEEVVRLA

SEQ ID NO: 165073 - protein, 161 aa, Heterodera glycines
EEKRLLLVGGKINRHRWVSSCGGGVCQCFVRLFVDFVDDGIILLRRFRNYCWCRCRCRRYRRGGKAKAIGRKQIVRSKGAQSVAIFAAQLGKVEQRQQLLLHTAHCGCCCCCAISGQLLRLAVRKRRRDQRAADNGRCRMGRTVGKFGLIGYRKSLQGTLK

SEQ ID NO: 165074 - protein, 108 aa, Heterodera glycines
  unsure (1)..(108): unsure at all Xaa locations
RRGHRRKRRRKGRSANWHGKRTLRNWRWRAQRNSQRRAHHRQKSRCCERKRATWKGRRXSRRRRTRRKRYFCRRDCARRASSREWRREGPNLGTKRRSPRGKNAAKRQ

SEQ ID NO: 165075 - protein, 70 aa, Heterodera glycines
MKFLQFTFNWVLKYLYKKIGIVEFNSGTIHTLIKQPFLIHLQFFFIKNQIYNKLVQGYIDQISIFLILFC

SEQ ID NO: 165076 - protein, 85 aa, Heterodera glycines
  unsure (1)..(85): unsure at all Xaa locations
TESDSRIWAYKFVAYSAVTFSIVAVLSVVVTLPMVYNYVAHVRRQMQHELGFCKGSAKDIYVEVNHMKSTPDMDLXVHRTARQTG

SEQ ID NO: 165077 - protein, 74 aa, Heterodera glycines
  unsure (1)..(74): unsure at all Xaa locations
DKGCFDKLAELNDSVNCALCVENLSEDFVXRFDLVVLTDAPFSTQTEVNGWMRNPRKMINSEDAFGRFSQASVD

SEQ ID NO: 165078 - protein, 172 aa, Heterodera glycines
ETEWPDELTFATPADSPSADLPFEESETKTLMAKQSPLPPPLIDPARFSTMLTLLGTTILVLQFIGRRRPKWLRSGISSIPRSGPPTGKTFRAARTFLIRQDQRSSLDGYDKHPTVFNEDGLLCLKTRLLHANGPPTLASPVLLDRHSSLTRLIVQEIHADLRHAGVDWTLT

SEQ ID NO: 165079 - protein, 144 aa, Heterodera glycines
MTALTPADVREQHLALRVMRLSNPKFHETICLGRDPADPFSMAICDSIGKLSGQSSVDLPLDSYLIAPHAMFFFYLGEMFTLYISIINISSVICKEIAIKVDIQTQNQRVSLEELAFAGIALEPNQQIGQILKHDIRELRQHNL

SEQ ID NO: 165080 - protein, 83 aa, Heterodera glycines
WQLRHLKLAGACQCHHVHSRRKNGELDESVHFRCPTASAPYSERTQFPSFFRWTTKKNLREPLLALCCCFFLLSKQKKKTKLR

SEQ ID NO: 165081 - protein, 135 aa, Heterodera glycines
  unsure (1)..(135): unsure at all Xaa locations
MDDENFHQANMERVREDEDEKIAIGRQTEDGETEPKAERERERKSDRERERKKKSKRTSRDRSRSKSRERKRSLXRRRSRSRSKERHRERERSREKERGEKRSKVKSNKYWDVPPAGYEHMSPKEYKELQVVVVH

SEQ ID NO: 165082 - protein, 97 aa, Heterodera glycines
  unsure (1)..(97): unsure at all Xaa locations
KEDRKAQLASQYMQRLAAMRMQNPAGLMGTMYAPASGGFFLPQAIQNQRAXAVHANTESVRGTNAWRCPSLEQYGRFQSSNARLHDGSSWWRSVRRR

SEQ ID NO: 165083 - protein, 182 aa, Heterodera glycines
TFYIYPNQNCSRILTSSWLLMEFLRPHIERWKKIFKILLNELIDLHKLCKEEIPCFTFTALAEKDKNCNAFVAALLELVKEDAYASIDGSGSNALLIRLRELYPSVIETLAWTGLQTLNAELFPSTQRMVQALRELIETTGLYFGAVPKASSSKEHFYHSVACVGDVLPNVDDHPPPQLKKI

SEQ ID NO: 165084 - protein, 171 aa, Heterodera glycines
  unsure (1)..(171): unsure at all Xaa locations
MLNQKDNFTLKELTNQTDEEKQLFQLINEDKIEEAEELVKSGKVRVNSLDNSGMNALDHACFKGNEALVEFLLGNGSDSDXRAHSDGYTALMFAALAGNGRICQLLLDAGANAHAQNNIGKTAAELAAFVGQHECVSIISNYISLRDVDAILHPQGADSAVLYPPELAKFI

SEQ ID NO: 165085 - protein, 82 aa, Heterodera glycines
NYSFAQQSSVLSEARLLADFFGVEQHKQRTPVQLVLGQIRCFNADQRAAFDRIANALHGRGDQKCLVSRVQEDVVTDFFNIF

SEQ ID NO: 165086 - protein, 109 aa, Heterodera glycines
PTNSLLTLAEPRPNMAIVVATLDALRSAASAGGRSLGLSLPMALLLLTLLFWHWHRGRRAHRHTFPPGPTPLPLIGNLAQVSLKWSKRRGDKMPKREGEVGQNAKKGGT

SEQ ID NO: 165087 - protein, 131 aa, Heterodera glycines
  unsure (1)..(131): unsure at all Xaa locations
LENIRRIDQFARKVIEHCTHAALVHFSIEQNNWLKTEEDGPLFIYERLDQPLNSMIVFFRQAPKKYVEPITDGMQLRXEPPYIFVQREDGCIRGLWAFGENKCEPVFDTPTNVSMELKKKSAGATASSPKN

SEQ ID NO: 165088 - protein, 79 aa, Heterodera glycines
ESCQGKASDCLRLKLEYSVQCLDYFMGPNCDLICAREGKSQNSKLHGGINRISTDQQENRKQTGTVSLAFWEHGTGKHT

SEQ ID NO: 165089 - protein, 78 aa, Heterodera glycines
FEVIHQFLSDGFELNQIHDAEPNISDFHPIADSLQLSNQPKMCLPESEIEHTFTGDLIELIGTSLCSISLEHWTEVIR

SEQ ID NO: 165090 - protein, 65 aa, Heterodera glycines
TLLINSCRMISNLSGFDHFKRLEVPHFVQFFEFSTGTKNIFLPFPHLRSSFPDKGRSPGVRGISK

SEQ ID NO: 165091 - protein, 120 aa, Heterodera glycines
GALFSRKRTTPMSFLKSGRYDSKHLKMNATPRESSLKRRPFFRGALFSRKRTTPMSFLKSGRMTQTKHLKMNATPRESSLKRRPFCRGALFSRKRTTPMSFLKSGRYDSKHLKMNATPRD

SEQ ID NO: 165092 - protein, 186 aa, Heterodera glycines
  unsure (1)..(186): unsure at all Xaa locations
GEQFTVSQQTKTDAQLSLMETAVDIKVENFDISADGRQLFNKASLTIAIGRRYGLVGPNGMGKTTLLKHIAARKLAIPPNIDILYCEQEIEADKTSAIETVLRSDKVRTELLEREKALIIQLEAGDISAXEKLQEVTSELKNIGAEAAEPRARRILAGLGFNKQMQEKAGEDFSGGWRMRVSLARA

SEQ ID NO: 165093 - protein, 211 aa, Heterodera glycines
QFNTNYAHCDTYPEQLWIPRGATTQILIASCRFRSRARLPVLTYFYGNNGAALGRSSQTLAGFSARCLEDESLMEVIMATNPFSTHLYLIDTRPRVNAMVNKVQGKGFEDTRNYTNIQFHFFDIENIHVMRASLNKLLEACQRTQTMTQYLKIVDACGWLRHLKTLIDCSVFIAESILRGISCDIHCSDGWDRTSQTVSLAQLVIDPFYRT

SEQ ID NO: 165094 - protein, 122 aa, Heterodera glycines
SFPRRYDNYYTIPNILCNTEPSSTAVEHHQSLAHIANNKNNNNENIATTVSQRWDSSGEPCPARESLPAGEPDNNHLPLMMREMPSGKMDDDDDDDDADDEQSSMGAAAEQLELQLVDSWSM

SEQ ID NO: 165095 - protein, 38 aa, Heterodera glycines
VLTMSPQCLECALLDQQTQCPLALACANKVNFFIYSSY

SEQ ID NO: 165096 - protein, 199 aa, Heterodera glycines
SHLSSVSPILPSPPLWPLWSTRPPVFAAPSTANSLHTPNSAAVRFPFSTCIGPMMSHFEMIGTDNQMFPQNVRLNPGLALCSSAPFGGHIGTSLPSAVTVSPAAVASVGGGELQQFAIPRISQQSQAQPVQGLQFALGQSAIFGGESARDGGGQQTQHLFDLSNSIICTNGSSMANASVISMAAAISKGSLLSQCQSQQ

SEQ ID NO: 165097 - protein, 209 aa, Heterodera glycines
  unsure (1)..(209): unsure at all Xaa locations
SIIIYLCINFFLLWHLFTHLPITFCHLLFMCQIGIIITMAPFFVPFCRNFLALFCPLISQFISCQFLALLCPNFXLYFANFAHFCAKFPYLFLANFWHSFATIFNPFFCQFLHIFVPNFPIYFLPNFCTFLCQISLFISGQFLAFVFPIFSFKKYLKSWRSVFFKIKLWHSVFSNLKIISTLCIFFSNLKIILTLDILFFSNLKIIFTL

SEQ ID NO: 165098 - protein, 202 aa, Heterodera glycines
MKISEETIRKRLQSINQTQEAVQTCSKWVLHNREMIDRIATCWMDIYKKAPEKLRIALIYLLNDVVQKAASKKDNNVTLALHPHWINATAMSNVNVKKAISRCVEVLEQRNVYPAHIIEEMKAALVSRIATEKDDSQSGEIDFSQMARSIDSFFKNEVLTEKAREILARSSFNFKESVQSRVKDREEGVKALADMDTSRQKM

SEQ ID NO: 165099 - protein, 189 aa, Heterodera glycines
MSTIIRKNEQRANDKNPGKKLEYEASVFILSEVFGEIFDQQKGVHLFMNGVLSIVEKSTGVFIEWKPCGTTPLTALPDHDDTEWVIEGEEAGEEENGTRGKQQKNADSNLRQSLSLDLNSIRSFIHGNLKKAPIWLRFICKDGTESDTYYFRGGGYESLVNCLQRYVFLTRSAKSDNLILISDSRTDAL

SEQ ID NO: 165100 - protein, 214 aa, Heterodera glycines
TNRRRESMDQHWPRSVNAHLNNHASHQQLQHSVGSPYMVASIPSTPSCSALVGPHCAVVEPLTPSAISSAFSHNNLATTAAHHQQQHNNSNHYASCNSTNAMSSSNLMVAASPYTRSASSVIHSHGARFGSDQPQTQQLQQHCIYHADGSMYNNSTLVEPGGVHGLHPLSTATSSSTLVVNINNNNGTGNAAVGANAATTPGSTPNTQRKQHRR

SEQ ID NO: 165101 - protein, 197 aa, Heterodera glycines
AKPTELEEISSDLSTVPTQIHVSIPENLMNFDGTELIDLPIDKCVIVYHCGISYGIEPELWKAKTMEKIDGDQIKQTQEMDTKQLEDYVTVYHHGWYGRFEDEQQQQLIDEEEEQKRQFDKSETDRIALSVEQKKEQLAAVDHKKKSHELSDNSVEPMEDKIEDGIKTIDTFEKKPAEKEEQTLIIDQQKRTDGRVT

SEQ ID NO: 165102 - protein, 156 aa, Heterodera glycines
MKKFFESVPDKGPINPRDAYAGGRTMPFCLYAKATEEIEISMFDIISLYPFVNYDTPYPVGVPKIVVSRNFNVNWTVPDDIPYDGLLKVKVVPPKNLLYPLLPVHIDDMLLFPNCWACAKRAKNEFVMTKDVKKCNHRPAQRAFLGTFTSIELRKA

SEQ ID NO: 165103 - protein, 29 aa, Heterodera glycines
QTLMFIKNMTHIIVSLLTQITNTNVLSKT

SEQ ID NO: 165104 - protein, 211 aa, Heterodera glycines
ARHTDELVTPGTSPIPPPPPPPAPRPFHSPPLPPQGNRNFSPPCLLPPSPSGTVNFLHTPPPPPPPRPAIHQPHTSPMPPRMAPPDTMMRFNTPRLAPMSLRLEPWQMFPSATPRQRMMAPTVPSHPQIQPMLPATTGGTMSHFSNKELLEDNRVGCSSAGGGRGGGAGSKRKAGEFFEELTTSPMPPRMAPPDTMMRFNTPRPAPMSLRM

SEQ ID NO: 165105 - protein, 89 aa, Heterodera glycines
FHFSSLFLRIFKSANVASGHWHAMATICTNLACISITYYCTFKFFRLFMGFLTNDKINICELKRSKPRSMEFLSLKYFCPISISKKEPT

SEQ ID NO: 165106 - protein, 108 aa, Heterodera glycines
TNLEKFLFEVSLDEPFAFASIWVLKFLVSRYSSYAKYYLFKLRHLLSCNSNSSLYKLLSLIKLTDVTLHPIDNLFKDRNCNTRHREDKIVRQLIGVHVQRLEKIHIKV

SEQ ID NO: 165107 - protein, 106 aa, Heterodera glycines
RSQFLSLFVPKRQPGTLNLLKSCFLIFFITYNISLYIYLIYFFLFDKKINFKKVPIKAYCNHENKNELIFQHNFISFFHMYSIKFDDRKKTLSLKKCVGKSIFLKF

SEQ ID NO: 165108 - protein, 183 aa, Heterodera glycines
SSNFPLFVTVKMNTSTAFTDKDLQLKLPFGMIISGPSSSGKSTFLLKLIAESKDLIDPSPVEILYCFGEMSSTVPVLQKAGISVYAGVPPEEFIRSQSKPLLLILDDLLTSIDEKYLSELFTKKSHHQNFAVIFVTQNLFERKIKVARQNAQYVVLMRSPNSTLAVRNLGVQLFPRQLDYFLD

SEQ ID NO: 165109 - protein, 94 aa, Heterodera glycines
IIIFVKLLICGISLLLPQFSAFSLLRLLSPRNSSTIRTKFWIFPGWTLSQTLSIIRVIMEMIKQIILIGFLGYLKVSEEHQLFYWLVTSQRNAS

SEQ ID NO: 165110 - protein, 115 aa, Heterodera glycines
DDQAEIVQKMGKDAIDSCLILPQPDLRHLEDGQSLRTLTIESRDDPKVQEICQLMLYWLNNELAEERIVVRNLQEDIYDGQVIQKLTDKLAQVKIEVPEVSQSEEGQKQKWRIIV

SEQ ID NO: 165111 - protein, 118 aa, Heterodera glycines
QNILREWPIRGNVVFPGILSLSAALPHFGSLLFPDDVHSALRQQLLRVFSEYVTIIKYQIARHNRLFGRRVVQFQRNFFLGLNKSRGLCNNTEKWTLDTLNRVGPNTFEIFSNEAKLR

SEQ ID NO: 165112 - protein, 49 aa, Heterodera glycines; identical to SEQ ID NO: 141744

SEQ ID NO: 165113 - protein, 115 aa, Heterodera glycines
SGQKEYLTRERLLQFLNEEQRDPRLNEILFPHFDQERVQQLIAKYESDESYIAQGKMSGDGFLRFLLSDENAPVFLSWNERYQDMDQPLCHYFINRWRRMAMDILWLLGIRIWHF

SEQ ID NO: 165114 - protein, 142 aa, Heterodera glycines
IGTSKAKPPKLIRLLIDRVGPVSLFLHFLAFAYAVFVISHFGTEKAKIQENALLAGLVEENWKDTSKLDHFLRDLRRNVGDKNSELRDYIVNALVEMGVEVAKHSFRLTPSSFLNNSSVDKVNVYGIVRSFRANPAESILLA

SEQ ID NO: 165115 - protein, 145 aa, Heterodera glycines
SLRPIDIFGSTSSILELSNFQMANESAPYEFILSVSFEDGHSYNSTLKLFVHAYPQIPVIDAQNLTVNLRADSVMLKAHISNGSADVFLNFTWMQTDGPSRVDLANRHSLSSASIVGPFNASGIYSFRVKAVTIAEDVVEASLFV

SEQ ID NO: 165116 - protein, 212 aa, Heterodera glycines
  unsure (1)..(212): unsure at all Xaa locations
FVNETEKQKIARGRDTEIAKAQTHVPYREILCSGAVWAVFFGGIGNFTAINLLYQFTPTYLYKVQGFEVVKTGFMAALPPXVLAVMKECAGLINDRIPARIMSETVKTKLFNSIAFMSMSAVIVAVSFVPSGYGNLALFLLTFSAFTLGFNIGGFYKSGSMIAGPYSPFVMGQISTAMTVTMLTVPVIVNPLTINNTREEWALAFYVNAAII

SEQ ID NO: 165117 - protein, 179 aa, Heterodera glycines
HSFAFFPSPFSFPITFLCSSPSCTTIVSPLLCFCTPAALLCCPKCVPFVSFGIGRVHGGRRKQMLPLLCWSMFVYLLSFDCCSPHRSLKWRFFLALALANEATNVPFQVVERCEKKQTTTKKIGPILRDRRGKKGEEKKPKGDIRRRRVKSEVIGGSGTEKWGGGGESAWGGGIRVKRN

SEQ ID NO: 165118 - protein, 122 aa, Heterodera glycines
FLFSETEDGDFASFKLLLLRKPLFVDILQNFLERLLRNWPLDESYCLLIEIWQTLIYHKLLNRCSDEKYKLFVQMSSQYFVDLIETQIQRMLTTDPKNLVESPVLSYAKENIFRCEPILGFF

SEQ ID NO: 165119 - protein, 148 aa, Heterodera glycines
  unsure (1)..(148): unsure at all Xaa locations
IHLLPSPTTAQRPKLLPNYRTTYGGADLASALNFELPPSEVATHTLYLALMDTPTEHDAXLLADAMKGLGTNXYMLIEILVTRSDAQLRAVNAAYQKLYCHGLDNDLSADTNGSYWTLLLDLVEANRDESYRTDLDKAKTDANKLFQA

SEQ ID NO: 165120 - protein, 140 aa, Heterodera glycines
MNIQGVFSSEAVSKIAYKMTPILDVLFVDELLKVSIGQTEGKLGLQLTQNPEIPDEEANFAAIQFDFSKNIHIELEMLAEGDAKIANFDHIFTRKLETFSNKFDEIFPIDHQEGSDSFNRLGKIALSNLLGGIGVWHGYS

SEQ ID NO: 165121 - protein, 186 aa, Heterodera glycines
FSMTGTFPSEPTFAAASSNAVVDDGGESHQTERPTETEDTSAAFLPHNISLRSVIERFGEENVLKEWTEEDCAGLLVQLLKNFCDYEVAKRIVRCFRETSVDEINDCFNLCKELNKRAANERVRMGNCVSCAPLPQESLPTFPNWSSVLAQAKKSQGIPDDSSAVVAKMLSEISAKYNDANFAPDS

SEQ ID NO: 165122 - protein, 66 aa, Heterodera glycines
LIVPSGEDTEKAAEQGQHSGAWNLDGEILLQPSDRPLHFRLHPGLIRYFGLAEEVELDKRGSCCCC

SEQ ID NO: 165123 - protein, 89 aa, Heterodera glycines; identical to SEQ ID NO: 131732

SEQ ID NO: 165124 - protein, 142 aa, Heterodera glycines
  unsure (1)..(142): unsure at all Xaa locations
MQNEVDFCKMRPGPEGQNGQPGIFGXPASPGRPGPQGPPGPDGQPGNPGESGQPGQPGKLTQGPPVVGPPGPSGPPGQPGQPGENGQPGQPGNPGPQGYPGDGGSPGQPGNPGGSGEPGQPGAQGSSGQCYHCPPPRTAPGY

SEQ ID NO: 165125 - protein, 63 aa, Heterodera glycines
CSLVTIGGPVLPLDSLYSWMSLMSWKMSHSVEAFRINPSSDWTALVDVQLVVTPRSNPRENSF

SEQ ID NO: 165126 - protein, 193 aa, Heterodera glycines
KTEGKATKKGRLQKRRTTPYDIWEDEGEQITATTKCKRVKYVPNLLPAVVPPPEGMSYNPPIDSYLRMAVIIANEERQIEKKRRRTERRIGIGTDEVATLPALREEVTYSVRGGGGVTVRMEEEKVKDEMAGGEDEKVSPNELRLQKRKTAKEKKRRKLRMEEERKKTAEKEVEGKMRRQLDSLKSLKAQVLK

SEQ ID NO: 165127 - protein, 172 aa, Heterodera glycines
MARLHSCDWEPQKWRRKSSKDIATPVPRKCRTANCSFAKTAISQPKSSSSVPSVLFVRIFQHTVVTLDCLASERDRELAALRIEEILNHAQRMVDESRGMQNDIAKQFETMRENLLAKLSFFYALQNECLNGEQILLKEHIEEKVYSAIHKCEQLNEHFLRLRELKSEFEQH

SEQ ID NO: 165128 - protein, 96 aa, Heterodera glycines
ICFWGTLTTVSYGICAALFLWQFFTRFRHNVLLSEHTSAGFSSEGCVRLGFSFWLLISAVLAQFASCVLLFWALKGRFKQTNEEQKSKEQDTVFLY

SEQ ID NO: 165129 - protein, 185 aa, Heterodera glycines
  unsure (1)..(185): unsure at all Xaa locations
ASVLERRSLLEMYADFFAHPDELVSAAYETTPEKRFLAVLKYYLNSFFPARKSGVAKKPYNXILGETFRCRWTLPDVPLNTEQTTRGPFPGSASNQLTFIAEQVGHHPPISAFYAEHPASGVCCTSYIYTESYVAGFSSLGVRNIGRATVVLGNHNETYTATFPDAVARNCHATPWFELTGKVKV

SEQ ID NO: 165130 - protein, 105 aa, Heterodera glycines
MEVWPTFHLLTDYVPEYGKVRVEGGVRYKLVFDNSGGTFFSREVKYGLRVKKVEESEEEEREHGAKEAEKTNGVTSWGEERQSVARDTEEEKENTIRDGEGKAKN

SEQ ID NO: 165131 - protein, 57 aa, Heterodera glycines
  unsure (1)..(57): unsure at all Xaa locations
VVSRPIPGPKGPPGAPGQNGNPGKQSQPGQPGGQGPPXGPSGAPGXPGQPGXSGQPG

SEQ ID NO: 165132 - protein, 162 aa, Heterodera glycines
PLRQLASKCFRRTSARLLLAKKRANSWHWTSAEPIFVSDIEGFMHSTDGNPFAKVGEMLRAIGISNSSAADCANVAYVSSLIGTRAAHLCACGLAAILNRMQRPRVTIGVDGSVFRFHPTFKFNLDQKIKALLAVKCEFFMVLSEDGSGRGAAVAAAVALRM

SEQ ID NO: 165133 - protein, 105 aa, Heterodera glycines
RHTHHNPHDHSSKRGEGPDCQGEAARCQAEEGGSWTRRIHKKSAAGERCAICMTNVSFFTRTTLGCTHPFHRRCLYRWIRYHTNCPVCRYNFARTIPRGERNQPL

SEQ ID NO: 165134 - protein, 158 aa, Heterodera glycines
MNRRWICNDVWMDIFPSFDRAQLGLKLALLSPRFNALVDKHFDGKSELTIWRSIFISKDKGPEPKLSVRIDDKFVPFPFPDDRPLPSKIRFKDLRIDYIDHSVIAFLRSNHQIFDKRGINLYLWIPSPHNTDGQPIWDIFGREIWPIFSANIRCLGFT

SEQ ID NO: 165135 - protein, 129 aa, Heterodera glycines
AEGAFEGGQCSRFSAHYLGSTEISNVEGTEDCRRAMQSAKNRVRQMADVPWVVLEISVTGINIRENDNKLFYRHPIANIQVVCQDEVDLNCFAYIYQEGDRHFCYVFCVLTAIIAKEIIVTLGETFNLA

SEQ ID NO: 165136 - protein, 76 aa, Heterodera glycines
TESGRWWSSATEHRRGHRAVATGHPSAGTKRKRQNCRVGIAERGRHGAVRNLRKDSDRSVLHHHNHHFSDLRVHVY

SEQ ID NO: 165137 - protein, 133 aa, Heterodera glycines
LIFIFKVIANPKTLGQCAGKIQKYLKSEFASITPSVSFVCSDTHLGEIWVSSGHNASGFFSLFSEEAHLQTNHFNAKLKTGDTNTAFARTGYLGFLRQTQAITADGGGRRERTTGRGAKGMANDMRHLRRNNI

SEQ ID NO: 165138 - protein, 92 aa, Heterodera glycines
MGGTRNYEYESAAGVVGTSAASGAAVTHQWPDDLIEIVHEPMGHTLDRMRRFSTSLSNVEGREGAAAESEKVEEKYRRTYREEYSGNGAERR

SEQ ID NO: 165139 - protein, 108 aa, Heterodera glycines
  unsure (1)..(108): unsure at all Xaa locations
MAQNSSTKAKIVVTDSTVSVKKLAEFGDVCQFSGNGQMPREMLLRELADAEALFCLLRDKIDDELLARAPKFFVLSTMSVGYEHIDFXACTKRGIRIGYTPGVLTDAT

SEQ ID NO: 165140 - protein, 47 aa, Heterodera glycines
  unsure (1)..(47): unsure at all Xaa locations
PPQPPPPXPTPLLPTCFFIGSHQSRLNRKVSFICNLLFFLKPIFSKF

SEQ ID NO: 165141 - protein, 90 aa, Heterodera glycines
CLPGSAFSLPNWFRLVLAFPEETTREACERIAAFCTRHMRPCRKQLALWGSQLDEEDGRGSEGAERTAAEESTSGEEEEDGHILSERSAE

SEQ ID NO: 165142 - protein, 170 aa, Heterodera glycines
YYCSPNFVDHFLRNQQHKTMMMMSSAAMLFVMITLALISFGCSIGAVKSEGDDESGAVRHSHELISRIKRYGYWYNSYGYGGGCACAPVPVTSSCYSCGSGGGGYGYSSYQPVPPPPPPMQPSYSSCATCGGGYGGYGGGLSGYSSSWNNGGSASSSWNNYGSSSSMSVG

SEQ ID NO: 165143 - protein, 57 aa, Heterodera glycines
SGGGGEAAAPAPEAAPAAEAAAPAPAEQPAAEQPAPAPAAEPAKQQASGYRRKRNQN

SEQ ID NO: 165144 - protein, 194 aa, Heterodera glycines
FPASFPFYPPTMTFLTDILHPNIDTSGKVCISILHPPGIDPLGYEQAAERWNRNRTVESILVSIQLLLVEPNFNSPANVDAAVLFRSDPARYREEVRRRVEMEIARTAPILPGAQPPPEEQGTQPPEEQGTTQAAEEQRAQPPEEQGTQPPEQQGTTQPLEQQVTTQAVEEQGTQQPATPPPEGPQQQTDEWYM

SEQ ID NO: 165145 - protein, 93 aa, Heterodera glycines
MLSSSACCTLLAALISAAFFAMANAQTVKQCLCSEIQPCSEKYMNTWKTCMQQCKGHFSSVGGDVEKLGHCLDSNQALLQSIIRCTQSHGDES

SEQ ID NO: 165146 - protein, 71 aa, Heterodera glycines
QETDEHRQMRRVTFEADVVSTGAVNASVATLTMLYNYGQTFFICLMAETDYCKARARDMWLEMTSLRIGKG

SEQ ID NO: 165147 - protein, 168 aa, Heterodera glycines
MNRRWICGDVWMDILPSFDRPELGLKMALLSDRFDVLVDTHFDGKNELTIWRTINISKDKGPKAKLLGYWMDFPMPDRPLPNKIRFKDLRIEYIDHSVIKFLRANKQIWDRNGIKLELSIANVQYILDVFVREIWPIFATNIRYLSCRSVGQFASLYSPTILTDLNQL

SEQ ID NO: 165148 - protein, 189 aa, Heterodera glycines
AIADLREGGGRDGANGRVEVRIGRRIVDGHGRASGEGNETRDEGGGGRGRVRRTVSKRIQNNSNGHRNTHCRGFSPLAFRLTDQRQSVPFLLHFCKYFRLLGIPNRMHRSSLLSAWEPPTSSASILKNPEQQQPSLLSDITEVFSAQQNVLGPSTSIGKITEMTHNVPSQFNAQVTVKELISQSFGETK

SEQ ID NO: 165149 - protein, 205 aa, Heterodera glycines
MSSHPKPFWASSAEARQKRKEWRQERAQKGGSTPKSPRQTTEAPSTTGEGTSTETMPSTSNAEPRKCKNHKRLLLFSTEIRSIGTPFSMDIAALLGEIRELHVFGRADLLTTEQITDFSNKCLGIHGYFKKLWETYPTAFDTNNAAGFIPKLHWSLAHGPDFAKRWGWFAWISEQGIEHLHHVLNKQSERFFRYKGDELLLKIGE

SEQ ID NO: 165150 - protein, 210 aa, Heterodera glycines
PISKCTRCNIFKRPRQTSKFFTNTPMKSVVSPTPFRRPLSLRCVCSVLVLLICAFDVSLAAKDKEKNGKEEPGGPFNTLSIILLIPLVIVTGAFVYLLFMKPQSEGTGEDDGEGEGDADVEKGPTEETKTEPRIESPATLLGVTVPLEQDEEEQKKDDEGGDQTAEKKEEDAAAADEQPKEGAAEAAEAEKSATKEETTEDTEETTEGST

SEQ ID NO: 165151 - protein, 160 aa, Heterodera glycines
  unsure (1)..(160): unsure at all Xaa locations
LIRFDLSEQHNDIRDGALKLTKQVVAPQAVDYQQTMASPCDIIKQAHHLGLMNPTLPAEXGGPGXSNFETALIAEALSXGCSAIQLAVTDSSVAXRSASLXGIQTEKRQYASMLATXPLIATDCVTHPRACSHMSGMKTNGELTRDKWMLNGSKACITGG

SEQ ID NO: 165152 - protein, 144 aa, Heterodera glycines
GIKFLIKKNGYSWPRVSTSTKQSKTNFGKFQGVQTALLQLAPPFSGIITGIAFFVVSIFSIGNKVLTKWIVQNGTKDEWAVVFYVSAVVAALPVVVFSMWGSDQPQLWARSSSMKRTQNSIASTITTATTISVKRKECPDTAKI

SEQ ID NO: 165153 - protein, 76 aa, Heterodera glycines
  unsure (1)..(76): unsure at all Xaa locations
AFHLLLLGLDPDGHTCSLCPGQPLLKEESVWIAPIDDSTXPPPRRVTDTILLLNADSNLTLNSHGRSKAACFPGIL

SEQ ID NO: 165154 - protein, 135 aa, Heterodera glycines
  unsure (1)..(135): unsure at all Xaa locations
AAARRMAGAPQPTRAKQYSPASGATAGGGGGALGPGYLAAAVGVATLLLFTMPDEPAYERPLEEWRERHNQNIENNIHPPPAPPQEEEEEHWAQAWPEEEEEAAPXAALNRGDFYLIGGVHDPISLRFEAAICAR

SEQ ID NO: 165155 - protein, 46 aa, Heterodera glycines
KKCNHIITFIISANTNSLCLTMPLAWTSVDTHNALLCAAVPSIGAF

SEQ ID NO: 165156 - protein, 160 aa, Heterodera glycines
DSQQKGRLTLKIEKFSDFSRGGESGTERYSDAVNIRGFSFKILANTYTMSADKSKKCLGFFIECNKNEPNWCCTCSATLQIVVQKKQKCSPPYIKQFKDNNFSAEKDDWGFKEFISIERLLNPANGWYNEKDDSVILVAEVFPYSPAYPPSWSQKRQWTD

SEQ ID NO: 165157 - protein, 162 aa, Heterodera glycines
EIWTQQDKKLTALKKLQGLIWEEGYRNGSLQSHVFPDVPKAFQTLSELGIPIFIFSSGSVHAQRLLFSHTQFGDISKFISGYFDTETGPKLESDSYRNIAKQINCPVGNVLFLTDVEKEAVSADEAGLQVRLFVREGNAPLSEDAAKKFKTLESFQNLLRID

SEQ ID NO: 165158 - protein, 208 aa, Heterodera glycines
MRYLLRIRNYNFLTKIGKSSVVQSQESPPSLLTDSKPFKKVLNSAVQYYEECIGLVEVHKARDEVNRCENNLFLAQQARREKQGEIKSLQNRLKDIHSELDRTQRGEDRYLHLLTEEHAAIKSERELLSSFEQLEANERDAFNLLSNKVRISHERERERDERTKYWSLTGSLLGAFLGIFGTTIANELRMKHIREMIPSGQQIQPLLK

SEQ ID NO: 165159 - protein, 107 aa, Heterodera glycines
AILWTLSLAEDPAEATRLFTKFVPASSEKCSKADFNRKAMPTGRKPHTQQKGAKIKGKRRCLSVYRSSHLIISHRCNFTGLFNFSMNCFKNPSEYSLQRDLQWVRVD

SEQ ID NO: 165160 - protein, 152 aa, Heterodera glycines
  unsure (1)..(152): unsure at all Xaa locations
ISPFCLKVETFLRANEITYEVIGSWNLRNAPQKRFPFIELNGERISDSQIILWRLSDYFKIEDGLFXEQRAKARAIERLIEGSLYYSLIRFLSYENATKMVNSEISGLRLPAFLSRFLARRLTEATRKRLLAESTLLHPRDITLESLSLDLH

SEQ ID NO: 165161 - protein, 196 aa, Heterodera glycines
NIMDISRLRRICAIYASDGINGYPFSLAVIKKALESKLNVCSLLFLHLRRDLPDTLKNNPKFVALECFGFDSLEAIRKRLAKEDISRESLVFIDSLPVLIEQFSLPSTSWFLTQIAELSACVLALVHSSESEDDQNSEDWRRIESIASTVFELRARDKHTLCRTKTKKRNGTAEEKLEQFSIEEDYSITFSPFDYS

SEQ ID NO: 165162 - protein, 177 aa, Heterodera glycines
NEAQNYWTAVGHKNFVIMDRKPFKKMANGPIETPKQQKKTQQRKANKSASALPSKFDARKQWPECADFIGMVNHIGYNGNGGCASAWAISAAAVLTDRICIERLKKGIRSYTNHASSFASAQDILDSHLDNKCSCSTEISTAIVWKWFAETGVVTGTNYSMGLGCKPYIYPPQKNCL

SEQ ID NO: 165163 - protein, 123 aa, Heterodera glycines
  unsure (1)..(123): unsure at all Xaa locations
APNLVSDQPNCTPDAPGDGTTSATAVQPAIAKEGFKNISTCANPSYVPNAMMNXTALIVXELQAMSKTGTTPKEITHVDTIAATLDENNRKLISDAMNKDRNKGVITAKDVKTLLDQLQMIEG

SEQ ID NO: 165164 - protein, 146 aa, Heterodera glycines
MSLKIGFIGAGKMAQALARGFINSGRYPAEQLMASCPKTEVATIEQFKKMGVKMTDDNTQITRENEVIILSVKPMQIGKVTPEIAPHVKQSHLLISLALGIRLLSIEQFLPSNSRVVRAMPNTPAVVCAGVSAYTMGSACRDGNSN

SEQ ID NO: 165165 - protein, 212 aa, Heterodera glycines
SALANTLAKLVLRYAELNKGVPSTVNKLASGALLLIASIIHLGKSGLCKQPITEDDLDRLSTTVRLIVDQWPKAVDVFLRECRASLESMLKAKGDVDRHERDTKAPKKKIVQPDKTIMFTQLSTRVSENVTDTNLFDLSLSQALGTAPKTTKYTFASSKLGKVIQLAGFSDPVYAEAYVNVNQYDIVLDVLVVNQTSDTLQNLSLELSTVGD

SEQ ID NO: 165166 - protein, 83 aa, Heterodera glycines
GLPGPPGPPGFYATNGQPGQSAPPSSPGRPGPQGPPGPDGQPGNPGESGQTGQPGKLTQRPTVVGPTGSSRTSGEPRTFFYNG

SEQ ID NO: 165167 - protein, 217 aa, Heterodera glycines
ILEITQEIERMRGQRDQKLAKINELERNNKELAVQCERFSHENLQHQSEVQRQLARAHEISEIRAEIVQLNDQIQQGENEIQTIAIRSQNQEKLVEEKRPSWEESCKNIQLARNLFTELLVRYNKGRSDAGALYELPPDAKASPFGHGTSNAQPKRTFGTSFDDDFKPNLSTAVDVNVQQKPVDKTSAVGDIEVKNNEIVQNGNQLSKESVSTVPYE

SEQ ID NO: 165168 - protein, 136 aa, Heterodera glycines
SFSLNVFQFIFFLMTEATKIYNRLSAFQKFRINLNCHLRRVRSNWLYQLSTALVFVTALNHASIYLTYGPDHPRCMQQWKERKQRGLLTDELLWKERLLYARRREFLTAVDGYGTVDNWKHPRATMGASTLSSKLF

SEQ ID NO: 165169 - protein, 97 aa, Heterodera glycines
  unsure (1)..(97): unsure at all Xaa locations
XENHIGLGIGFVRSQMAIIATGVTLPSLYWEMSEMNSKVRDGVEDFGVGADSDWTDLMDVQVDVTPPSKPRDNPGNSIFFFGRRLDRSCQWAGPRQA

SEQ ID NO: 165170 - protein, 126 aa, Heterodera glycines
  unsure (1)..(126): unsure at all Xaa locations
LVVIHQLYTQINQMNNLEMDCVQVFRVNXDSTRTDLMEVHIGVAPHTHSPDNPFNSIFLHQKHQGLPSXCVCQLNAAIWPHGPPGPPGPPGTHDYADGVVIPEHAALSDKQISPCTPPRYTCPKCA

SEQ ID NO: 165171 - protein, 204 aa, Heterodera glycines
MCSSADEQISRHAMLADLELLCRNRCGFYGTPQCDGLCSRCWRDFQLESKRQNDYQNNIKVLRQHQQHATGPSGAGGGSAVAPSSAAAVTRKGSDARFNSLKTLLKKSPCVFSASTYDQSPLIILGPRPPSPDTVTAQEHLHQFLEANFAHVYAKELDKQCQVFIDNLFKSEFLPSDELSLLVQAFYQSIQESAVKFAAQMPPP

SEQ ID NO: 165172 - protein, 207 aa, Heterodera glycines
FPSTLLATNEPFTQPRHICATDFLNYEGQKFSKSRGIGVFGDAVASIGIPPDVLRFYLLYIRPEGQDATFSWDDLTQKVNSELLANIGNFIHRSLTFLSKNFAGVQPSVVPTSAEYSLFAAVDEEMEQYTKAMEEVRLREALKHILAISRKGNQYIQAGEPWALVKGTAEERKRAETIIGVSANLSALLSVLLYPFMPSISAQIQHQ

SEQ ID NO: 165173 - protein, 206 aa, Heterodera glycines
MEQEAFYTVGEFDRSKIDLNKPAMTVEEYMQQVVVGRELLPDVAVASPEVLKRFSATPLRKSLTNLPGICDDSRTFTSRFGPNKEWCVAKSNEFSQSRSEFECVKVPDDDPLKDVQLPPMNDWMRWCQVCFESRLEGFAIAPENEKRFAHHKGTPPTVSLITSLKDHQVNELIIHQIKYMLNKGQTRATLQWLYALLLVVKKPLLP

SEQ ID NO: 165174 - protein, 54 aa, Heterodera glycines
  unsure (1)..(54): unsure at all Xaa locations
VTLPSLNSEMSXMNXEVRDGVEAFRVNTDSAWTDLMGLSVGLAPPSKPPDKPFN

SEQ ID NO: 165175 - protein, 155 aa, Heterodera glycines
ASVCSLLAIIATVVTLPSLYSEMSQMNSKVRDGVEAFRVNTDSAWTDLMDVQVVVTPPSKPRDNPFNSIFRAKRQLPGHCQCAGLQQPSCPPGPPGPSGPPGQPGQPGGAGQPGQPGQPGQPGQPGANGVVSRPIPGPKGPPGAPGQNGNPGSQG

SEQ ID NO: 165176 - protein, 93 aa, Heterodera glycines
  unsure (1)..(93): unsure at all Xaa locations
VSMCSLSTIIAYVVTLPSLYSQISDMNRKKRNRFEAFRAYTDSGCTDLTDLMVVMTPPSQPQDHPYNSLFPAILXLPGLCQCAGLRLPSCPPG

SEQ ID NO: 165177 - protein, 104 aa, Heterodera glycines
FFFKFFGRVALSPSAQKSPHPSCWLFRLSISERFISNMVNGPFRKGPFMISMTICHHRWTQASITKNLLLCYSLGFHNGNKNQPVLPMIHHFMNSKCSLILLNF

SEQ ID NO: 165178 - protein, 59 aa, Heterodera glycines
CSFRHFATASATKRGPKVEPSRLPNGLSVASVELQGPISQLMFAFRSGARFEQHDEAGL

SEQ ID NO: 165179 - protein, 173 aa, Heterodera glycines
RRHAYWRHKMRDGVPNSAGMEKRMCAVGFVPEFPVFSSISSRAASSLLSVISSSICFAASASIVSSRFTVPTGEDQPPPGGCSLLLIICSAVIRNGGTTPATFSLPTTAAQRLTGIGRQDKAADECPERKNAPRIAATGAGTVQHSNAISSNREAASLSIQRRLFARGFNSFF

SEQ ID NO: 165180 - protein, 111 aa, Heterodera glycines
  unsure (1)..(111): unsure at all Xaa locations
MMQMNCKLRYGGEAFRVITYSAWTDLMDVQVVSTPPAKSRDNPFNSIFRAKRQLPGHCSXSGLQQASCPPGPPGPSGPPGQPGQPGGAGQPGQPGQPGQPAPPWPPQNIPC

SEQ ID NO: 165181 - protein, 189 aa, Heterodera glycines
SYFSPTIRYEYADESNISQPSSMYADPPLFKEEMSDESHFFLHSNNSNQSLPFPASTFVQAHDDENLQPPVAAFSPFAIADTSQELHYSQPAPSSVDYFFWQSDEASSSSVCAEERRQMYEQYGGQKQMRRTENDKNTEQCQRNAQRNIGERMPTMDDNNDQQPSILRRMPLQSMENASLLKLSEFSSS

SEQ ID NO: 165182 - protein, 214 aa, Heterodera glycines
ITYSGSFATTVHYVNTPLANSLNELLETTVSEKGISSAMSLQEKNSPLYASCEKFIEADATSLRSLSICSELNARIIQRGGRTRVSGRSNKDKMIRRPSPPSLPPPLPPRKQSSQPCFSKYIPPVFDGDYVDIDAIMEINQSEYINKSMLISSNAGREMPKYQSHNATDYIQVYPNATSELRKTDDSLRAPMRRSSSLYDFFVSQQPPVHSLAK

SEQ ID NO: 165183 - protein, 196 aa, Heterodera glycines
QTSLSCPSKSRPEHLFCLTPEHLCDGVTHCANGEDEDSKTYCRAKCDDKKEFSCRVSEICLPKEVFCDGIKHCPFGDDELNCTECRGEAKRCGDHCLPKRKLCDGEVDCQVDGGSDEKDCDCPSCSGMNSALCDGEQKFCVDRRRLCDGRADCPGGEDENDCHGICPSLPKGASRTEDKNTDGMGQCSDGVTRLWA

SEQ ID NO: 165184 - protein, 192 aa, Heterodera glycines
GFPGMDGEKGDAGYPGPAGPALRDGFVVVTHSQTTQVPNCPQGTEKLWDGFSLLYIEGNERAHYQDLGDAGSCLPRFSTMPFLFCDFNDVCNYASRNDKSYWLSTGEALPMMPVNEREIQPYISRCSGCETPANVIAVHSQSIQIPNCPNGWSSLWIGYSFAMHTGAGAEGGGQSLSSSGSCLEDFRTTPFI

SEQ ID NO: 165185 - protein, 164 aa, Heterodera glycines
IFFGRITTGAQDDLRKITQIAYSQVVKFGMSEKVGPVSFDTPEPGEMAFDKPYSEATAQLIDQEVRDMVSAALRRTRELLMSKVEQIERVALRLLEKEILAREDMIELLGPRPFAEKHTYEEFVAGTGSMDEDTTLPKGLDSWNREREKEEKKDGEKEQKKEAA

SEQ ID NO: 165186 - protein, 196 aa, Heterodera glycines
VLTFLRSNKPIWDRMGTKFELEVYSYETDQIWDVFVREIWPIFATNIRHLSFAGADALDNLRRRISPTLLTDLVQLYSITSYGLCPDGISDDGPNATAGQALSKWLHTPSKNGKANELYCCAYFCEITWINTFKETFLRATTSVAYNVRLELLVANEMNTVEQFELVNEMTQEKLTLTKDEEICLLKRCPIVGETA

SEQ ID NO: 165187 - protein, 133 aa, Heterodera glycines
RAGGFRLIPAVRWSSCPPRAEFGTRVKLAGITKTFSKNESGTYACKIETTKKNVEWPSFKLGEEFQAEYLDDSVPKITFDYNPTTDELIETHKKVDSEEKPDIYKYNIDSDGFLVMQMEYNGVKTKRFYKKNE

SEQ ID NO: 165188 - protein, 144 aa, Heterodera glycines
KLPPAGRLCIPITISPSDIGQDKMLLDNGTLIFFSAQLLSALLSLVPLGLGIMAMLCSVYLYKFTVYFHALPSVMAWCASAWFSAKLLLDWTDFWICVNFQADHTNVPLVSLVLSIVLACSFVFEIFFKNSLLKKQLATECAIV

SEQ ID NO: 165189 - protein, 186 aa, Heterodera glycines
RREKRSIGKRTTKNLGKKRRKDEAVTAPPVTGVVLPSSTTAAADVPPPPCPSETANGQGPSTTTANAKSTTTTASNSNEHQEKEEATAMLLKMQLGTPVPMSHNVCADKPDYAVEKPALEKWSIGIQAFQHQPPASSTGFFKRMHKIVKSVRKNGPAGVEDGADNENNNKKDNEENGKKAKEHQKR

SEQ ID NO: 165190 - protein, 187 aa, Heterodera glycines
  unsure (1)..(187): unsure at all Xaa locations
LVAIIATVVTLASLYFEMRPMNSQVRDRVXGFPGKTESGWNDFMDTQMGLTPPPQTPXINPFNXIFRGKKQMAGHCQRGGLPQTKMFPRFGPVPPGSLDKPRQTCKGQDNPEQLDKTGQTRFLLVPAPKKLTCPPXGPGGPNPARPPQEIGTPPAHKRKTPVTTRVNTPLQGGREPGNKLGSGPGPP

SEQ ID NO: 165191 - protein, 191 aa, Heterodera glycines
FPFFFLFFFFVPSISSFQFARCFQKLERHSIDNSQPLTEIFRSAPTDCLEQCISHTGNGDEQENPGYCRSVVYDHLQHSCRLYGHDGSKVPALIHPANGFDLYRRTSSMQECVGPTQRLLALNAKKGAVFAAPSQQVQSVKGKTAIPVTTPMAEDETLSDEELATLLDQLERKDEKGTEIVRQRHEGEGKV

SEQ ID NO: 165192 - protein, 201 aa, Heterodera glycines
QEQIQHMEFSLVTGGKGMERELASHRLDDNVATELKLVLAAGLYPQFGVVDPTNNFREGHDQFAHTPSKPFVVLHPNSALGLRPEVLRSDDLDSEGHSVQHQLIYFGLLLETTKPYLCNSCRIPASFLLVIARNITCVSPSVLCCDGFVEFHFVKARHCDDSLAFACRVRSLFLQSLEHKLRSDDYGDCRELERLIIFARL

SEQ ID NO: 165193 - protein, 185 aa, Heterodera glycines
VGGVAATCIRGIRCCFVEMSVASAGPATGFMTCFASMPFSRPFAIIGMPFSMPSIRRIGIVCSLNSSGPDLVNKHFSLASAYLATRVLSPMDSNCGNGLKFTLASDSPSSSFDLSKEMYNEVNAVIGLDDVLKRFAFDFSNSASVSSESSCFRFRVFGFSVEGVAATCIRGIRCCFVEMSVASAG

SEQ ID NO: 165194 - protein, 142 aa, Heterodera glycines
  unsure (1)..(142): unsure at all Xaa locations
VRSLMAIIPTDFTLPSLYSEMIQRTSNCADXVEALRVNTHSGWTDLMDVQLVVTSPSNSPDNAFNSIFRVKQQLPRHCHCTGLQEPRCDPGPPGPYEKPVQTGQPEGEGHPGHAGQPEQSAHSCQHQKIPCPRCPAGSHCRP

SEQ ID NO: 165195 - protein, 107 aa, Heterodera glycines
LDTRIVLVSAPMCTLLAIIATAFTLPYLYSEMSQMNNKVPDGVEAIHVPSDSFWNDQMDVHAALTPPANPRDNPFLSIFRVRRQLPGHVVRPGQSGQAGQGGQAAPA

SEQ ID NO: 165196 - protein, 159 aa, Heterodera glycines
VGQYLMNPFGEDDDDFELNYVLDRNTYIAHMIASELADQIPSKISDEMEVTLPHTRASFKIQDIIPKGHLSDFQIAPKDMQLIRANELANAMMELEQKRKKLSAIFRAAGRKQTPNSLTIVPGAADSSSIEENRRLTSTIEEEAVPPPTTPTKKEHPGP

SEQ ID NO: 165197 - protein, 81 aa, Heterodera glycines
  unsure (1)..(81): unsure at all Xaa locations
IASKSSLMNSLHTNKCRATLYAYTSQRNTSTRQLFEAFRGNIKSYXTELMYKLGTKTPTTNARDNPLGSIFRVKLQLTGHC

SEQ ID NO: 165198 - protein, 201 aa, Heterodera glycines
  unsure (1)..(201): unsure at all Xaa locations
FSDRFSDDQFSLFDAIHQPRPLVKNNVREIIDMANNRRLTVVEAEDANILRMRVGRFIELNGRTEMSLHDAYQLKLVQKPQTLAEVIDSGSLDNNGRFIDGVKPRTLLEAICSGMLDPDVAHIKAGPGDELISIGEALKRGRLTPKGEIVLTLGEVGIHXGEKINLFMAHERGLLTSRVQHTIFDVKGVRNAADGSIMSFK

SEQ ID NO: 165199 - protein, 157 aa, Heterodera glycines
RGEAKDPQGEPTAGTVSREKLLEILLMNKLASTGKLPPKSARNFLHKKLQQRKFFDSGDYNMNNNKPIPPPIGHNLTAATTPKLAVPVETEPDKKMEQSAPIIGSQLLPMMRPLAGSISGCSMDDGESDDEGGKLQIPRPDTLPQRESTILHPAAHS

SEQ ID NO: 165200 - protein, 89 aa, Heterodera glycines
FFGVCLSTVATVIAVLSVPFAYQHFQQIGAQMQNEVDFCKMRSGNMWREVKPKRRIGKAGKFQKNFNKFSGHPHPGLLQGVARQPSQAS

SEQ ID NO: 165201 - protein, 212 aa, Heterodera glycines
FDAVVLEDVAALKSAEDWRSFLPLAPLLRVFSDPHHSIALPPSADSEETPFQCSVVQQIAPNREESTVFILDQQYRSNMNAQIWSGRAFYAPLYKELDLARPVAHAQQELRLNHLMDRLVLDERTVNTDTLTLVDTGALEGHWTETMFKPYKMAAWAGDSSAPSLVNWGEALLAAMHIDSLLSYGIWPFQIACFTHSSAHGEAIRRILFSLN

SEQ ID NO: 165202 - protein, 85 aa, Heterodera glycines
PFPATIASPLLDVGQVLRTKSTESLPFLLCLANLAVCVQWLLYGVLVDDFYMKVPNGIGTFISTMQLSLFIVYPRTYKQLTVGNV

SEQ ID NO: 165203 - protein, 72 aa, Heterodera glycines
GQQKPNNSSYYSPKGIMPIRRGVQKKIDRTSTSKLQGSAANLQLLRRTSGLGNGQAQETRLRSVSSVAASHR

SEQ ID NO: 165204 - protein, 172 aa, Heterodera glycines
FESPSQRLSNMRQRKEFVTEQQQKAFPSPAVAVQIKVRADNRTDIQIKEAFCEQKTNEMAMPKVEHYAEHSSADVFSTDGKQTFGQNESEKRQNGKYVLSGLSPEISPPPYQKMNMSHSSRTNSPEEQKGNFHEIFALSAQEARQRMKGRKRDPRKEGKMTLEEKHRLILNL

SEQ ID NO: 165205 - protein, 101 aa, Heterodera glycines
KKRGIGLFIFTNKIQTESTKGLISTDQPAFDLHSLLIYSLIVHCSPFVTCKFCEKHVPLVLLFCYFPVTLFSPSFSIVNRQKQTNKFHFLTCAGDERCFIR

SEQ ID NO: 165206 - protein, 206 aa, Heterodera glycines
MPSALPLSLPFCLALLFLLLLSPSPCFSSSPPDDSPIVSTKFGKIRGQLLHVVDPVDGQPVALTAFLGVPFARPPLGKLRFEKPLKPEKWSGVFNASEMAPACWPIARAEIYAEPDQLSEDCLYMNIFGPEKLPSDDANLAPVLVYIHGGGFQAGTSRQFKPEAIAKFVRRGLLFVTIQYRLAMLGFATTGDASFAGNYGLWDQAM

SEQ ID NO: 165207 - protein, 203 aa, Heterodera glycines
  unsure (1)..(203): unsure at all Xaa locations
ETHIVLGIASVCSLLAIIATVVTLPSLYSEMSQMNSKVRDGVEAFRVNTDSAWTDLMDVQVVVTPPSKPRDNPFNSIFPCKRQLPGHCQCAXAQQASCPPGPPXPSGRPGQPGQPGGAGKPXQPGKAGQPGLPWPAQKIPWPPCPVGPPGRXPGGKGTARNKREPLEHWGPPPKGEGLGNPGGPGTQEKPWKPGKPPRNLGQP

SEQ ID NO: 165208 - protein, 164 aa, Heterodera glycines
EGEEEEEEDTWWTMPMPELAKLKGFPFDADQLDKVEKLTEVMDVWLDSGLAWQTLTSNADDFDGESGAKLVADLVVEGADQFRGWFQTSMLTSMALQDSVPFRRILVHAMAVDDRGKKMPKSKGNVVDPKTITGCEESAPSDAGALGVDPLRLWRAWLASESSG

SEQ ID NO: 165209 - protein, 165 aa, Heterodera glycines
MNFAVRLPLSPLKSFLLPRLWPPFCCCSVSSSSVCSVPLFAYPSLVSFPSPVAAFLCQRAGVAGQSLPLRLFDVRSRQKQHFYHHHHGTFSARFSAFLRRLFPFGRGGAVVLMAFNIKQLFSFNRTDVLDDDPLKDKVKRAMLHRKYGEWAAAVQVLNEALNEAV

SEQ ID NO: 165210 - protein, 216 aa, Heterodera glycines
  unsure (1)..(216): unsure at all Xaa locations
KEAIEGDQKTHTFCGTIEYMAPEILMRTGHGKAVDWWSLGALTFDMLTGGPPFSAENRKRTIDKILKGRLTLPPYLSFEAKDLIKRLLKRHVDTRLGAGPGDAEEIKKHAFFTHHVENWTNVYRRXIEAPYKPNITSEEDASLFDSKFTKMTPVDSPTAELPPMSVNPFEGFTYIAPSVLEQVSQPTLVRPRQQRKIHGPAIFHSFHPHQSTTDNG

SEQ ID NO: 165211 - protein, 202 aa, Heterodera glycines
RCWVPGVPGAVLTWRPSHGGPLPSGANQSGGYLDFPSVSQHHPGQYVCAAYDPSRDPIGSRPVDSDNVRLKLRPKKPFQVLVEPPYQIVDEEQPLPRPYRCWVPGYPQAVLKWRPALDEMLPSGVEEQHNGALLNIPRAELRHAGDYICTAYDPHDESPEENTAQRGRGGGQKEAAEAEEDGTRTAQAEEEHRGSAQGKLAE

SEQ ID NO: 165212 - protein, 184 aa, Heterodera glycines
  unsure (1)..(184): unsure at all Xaa locations
RGAIKLSKGHEIRGHQFVATFFRQPTFCSLCSEFMWGLNKQGYRCRLCTLAVHKKCHEKTLSQCPGSAKNSKETIYLKERFKIDVPHRFKQDNFKSLTFCDHCGSLLYGLFKQGMKCXVCGVNCHNRCERHMPNLCGVNQKQLSDALLEIKRSTPPGSVGGGTAQQQQMFNGMGNKFKALFRPQ

SEQ ID NO: 165213 - protein, 208 aa, Heterodera glycines
MDCSSKIKLPNELKAELANAFRFDFRWSVLRVSSSVFDHFLAKRQHKILQNVDLKFRQSCEQHVELDNVGQKLANFRNEISLPMSNVPIHEAVIAARILISLHTRNFNELYAFLESHKFPRQIHPKQQKIWWDIHFLEAEQTLGKSQLSLLEKYKVREEHPLPPTIWDGQRKNGLLNENTLTLLNEQYAESRYFYAGRWEIAEATGLS

SEQ ID NO: 165214 - protein, 76 aa, Heterodera glycines
MTSISNKLTSVQVNNSMVWPNFQWPSSWPSTATTSSSSMPIWRFVCCPSSAFPSSLFCPSSSSSMFCCCCGCCTFS

SEQ ID NO: 165215 - protein, 66 aa, Heterodera glycines
IFVRVRVRGSKWAEMISASNSTAHIKQFYFETFFENFLFQKRGVHFFLLPSLGIIQKWSNKAVRTQ

SEQ ID NO: 165216 - protein, 93 aa, Heterodera glycines
INCNLNLNIKAKAVAITNSPNAIRAIIERNDDFVQIVRLFILPLKRPPNLLSLQQPNLAPLQRPIAISIFVFFLQCQLFVGPFVHQFKRLNWR

SEQ ID NO: 165217 - protein, 92 aa, Heterodera glycines
CTMIILHSLRLLYYYCRALTNTACAVVVMMILTGTIYMLYISVSTCCTYSIHPLISKHRYSKNGFKLILKKLKIKTINIEINILFCINHIHR

SEQ ID NO: 165218 - protein, 142 aa, Heterodera glycines
MNVSDEEIHFSRTVRHLNQRLFFGLLSQFSGNIAIVWDGKAMTTQFDMIVTPILLQEHNVTKNYKLELVAQPDTQHVVYLIYATRQSVLLLMRNWLHQLPDDDLRLHHVVFIPDASLTLRQQLREDQRVWDRLQSVDSLPLH

SEQ ID NO: 165219 - protein, 58 aa, Heterodera glycines
IHILKEKQNRHTKHSKAFDYISSQQRLGHVHTMIRKNLSVCLPPDVAALASHDLLQQQ

SEQ ID NO: 165220 - protein, 75 aa, Heterodera glycines
QMRTNSKTFSTRGGRPNQLVGRCAEKGSINGEQFVVHFSKDSKKRAQSAKTTCRCKPERTRIGEQTTTTTNDLTD

SEQ ID NO: 165221 - protein, 167 aa, Heterodera glycines
  unsure (1)..(167): unsure at all Xaa locations
KLVKDCFKRTLGRRILSFDQLNTFAAEVEATLNYRPITAVSDAVDGPVPLRPIFLLQPEIHINXETTTDPIDSEEMFSSTHERLTSRIQALREANDIFWAKWHSEYLTLLRERAQXDHKGPRHQNFGEPKKGMVVLISQDLVPRNQWPMGRIVETHGRPGAIRSVKV

SEQ ID NO: 165222 - protein, 59 aa, Heterodera glycines
SLFRFQYLNLEIMESRTNISCPNCSALLHASDIYALLDHQPELLDRYEKFSLRRALSTD

SEQ ID NO: 165223 - protein, 46 aa, Heterodera glycines; identical to SEQ ID NO: 150977

SEQ ID NO: 165224 - protein, 178 aa, Heterodera glycines
KCIDFFQKNGSPAEKRQLEAIMAKSGAIRHAKTQEYTGPDIPLFLFFESILGDHMKRLLLASTEIRSIGTPFSMDIAALLDEIRELHVFGRADLLTTEQITDFSNKYLGIHGYFKAKNFFAFFSHSPFKNWETYPTAFDTNNAAGFTPKLHWLLAHGPDFAKRWGWFAWISEQGIEHL

SEQ ID NO: 165225 - protein, 97 aa, Heterodera glycines
FLCFSNGNFMYYFFENIRVKNFFILNQIQRRNQQEHQIKTFFINCAKSKNKKKMPECRFKIPTFLGLESRLPKFLRTSAKSLDGINVSFHSILLALI

SEQ ID NO: 165226 - protein, 123 aa, Heterodera glycines
VPSGVSVVPNEFPGDSIVATVVESATPAATAEHFDYSTKITAPIRPYSLFVSFSSFPFVGLLGFGSELFPWGVVVIICSPPPNPFICDGPSKGATVVSVTEGGMPLTETFIYPFVSFMSVHPL

SEQ ID NO: 165227 - protein, 211 aa, Heterodera glycines
ARAKFTDYFTSVAETVNQYLDNVNDFLHRVNQMTFSQRIEVLSTLERALVVEYPKNAEECVSWARELFDTLYHNDIAQMLHNFPSSMLTAQGDKFWSGTKRCPHTLNFDVNNPEHFEFVFSASILRAQSYSLAPITDRKKVAQLAMAYCSKPFRPQEGVRIAVTDAEATANDGNTANGDADETELRLNDLNVKLARLKLENIRRMTPIDFE

SEQ ID NO: 165228 - protein, 116 aa, Heterodera glycines
MSRNRLPPELLLEIVLCVRRGHNTPNICFSSRILRTFMEPRVALWRRVWISMLRKLSDAYLKALLTSIWNYVPLDENCQMFFGTLNGVFRQLEDREIAANCLISGPGGIKGQIPLA

SEQ ID NO: 165229 - protein, 183 aa, Heterodera glycines
  unsure (1)..(183): unsure at all Xaa locations
LDAHQKEEEKRIPLIIPTVSEYRYAEPDTDENIIFEDYTHNSGIPVVRAGTVLKLVERLTYPQYTDFXFVKTFMTTFRSFCSPAELLALLIERFVIPTPHIFMALDPQHLLSSVMANSSCNDSASLSNGSLQHSQLHSFAHNLSQSQLEQAFHKFRQEYQKPIQLKVLSIINHWVSNHFYDFE

SEQ ID NO: 165230 - protein, 185 aa, Heterodera glycines
MKEKEDAWETVRTEMIEQGFVNFERKSWRDVRNHDWQYLRRSAVAKYEHNQKAGVEMIQYNEVDKLVFEIMGNEVSSFDNTNNDSVFLHNFPNDEGQQNEVADPPFFPTFATNALRTPKLEELQQMNSNLSHSISVGSSRDPPAQTKGFSVETIKFFGICRTKRFSSLWRNSVRPFAQSSFRHPL

SEQ ID NO: 165231 - protein, 97 aa, Heterodera glycines
MPPFAPLLSDFGIAGESVGGSNRCAFRFRDSVGSFNSPRYPSNVRHPFCLPFLLLPFQYPLDAECTYHIVGPSNAQILLFFKVWPNSSPITAAFPFN

SEQ ID NO: 165232 - protein, 207 aa, Heterodera glycines
KMCEPIGNNNDVSASQHFPGASGSGGLTSVSPLEPLDPTKFRNIMVEKHEVPSAFGNFCDNSEMTSDLAPLGQQQQSSTGPFLHPCFPPAAVSALHQSNPQPFKVQQSPSIGQQQQQQLYFVQQNAQGNFGPMHSFSSTSPLFGVRQMSYFGPGGVSVQPNWNQQRQAQYINNPQLGQQNNIMSPPKQQQQFVVANCKPSQPCQISS

SEQ ID NO: 165233 - protein, 60 aa, Heterodera glycines
YTVSLFLCLFDFFQPFFLTIPKLEIGPLIFLEFFMVSYNKNECLIYNLDRSNTNMAIFAT

SEQ ID NO: 165234 - protein, 78 aa, Heterodera glycines
QAPKNKKIIIMILLFFSGHPFITRVSVDKRTQLKRWYNTLEMTNSLVKYFLHLLMAGTFSDHLFCTNFQFLLISFVSF

SEQ ID NO: 165235 - protein, 190 aa, Heterodera glycines
LKKGQRKEWAEETAAGQANGRTAPPFATLQRGNRTQRKQFCVYPRGVAVQFGGCEEEQLDNRNIGEENTEQKQRQSESEGRGFLKETKRSERSSQKPRDPRFITPLCSSSSEPVKRRSLLVEPMAPLEDHHELPVVVLQEERLNSQPPVSKEYLQELFVQLDVSFNELHNRRPPSSACSSGAAPSAQSAG

SEQ ID NO: 165236 - protein, 183 aa, Heterodera glycines
  unsure (1)..(183): unsure at all Xaa locations
DAIKKKMQAMRIXNDKGINRADAAEEKCHQTQERLERVEDELRDSQNNMMATENYLDTAQEDLTAANYLLEEKENNVLDAEVQMVSLNPRLGLLAQEMDKLEECLKLATDXMEESTDHCDKSXACHKXMENRSLLDDERANAIQDQLKEALSLEEXTGXKYHHVARKLAMVESDLERAEELTE

SEQ ID NO: 165237 - protein, 65 aa, Heterodera glycines
  unsure (1)..(65): unsure at all Xaa locations
IDGRRNVGRCKLKHPTPFLXTLESLWQERHTAYAIQHDAEEERHNFLNLNGRLLTDSLVMPEMKG

SEQ ID NO: 165238 - protein, 117 aa, Heterodera glycines
YILYMNELPSHIGNLKGGGGAHWGIDLSDSYVCTINYFKLFIKILEKLRNVRNKFCIQINGFRVYVTRIHIFAIFGIPIREFDEQSLAQTFIELLDTFGATIEGDHDGDEHCNFLPV

SEQ ID NO: 165239 - protein, 140 aa, Heterodera glycines
LIFLYRKFFRFFVKSNFCDLLFKFGNIGGNGSTSSIFYCFFQTNFPYFSHFQLHYAARVSTQMLETLLEQEAGRALINSLNNAGETPSMVALLAVSPLYMKTLFDHGGELLNKSTDKNPLIELIKSMKGSTPEYVGFLGI

SEQ ID NO: 165240 - protein, 172 aa, Heterodera glycines
MGRKNLKTSKSLRPLENVNDSVGKIGEDLEDEELEEADDNESLEDEIGAESGEEPFELEFVGYKSATKSAKCLLLEALEDNTIATSRFVLFKFSDGIDHSVQVANKALQWIVSPVDWETFFNDFFNKRVLVVNRKTKDYFEGFFGTVDLFEMLQKFDLDVGTDVNFSLYENY

SEQ ID NO: 165241 - protein, 61 aa, Heterodera glycines
TKIETRNKSFLLTFYNDHLMGKKQIFEFKTYCSNLASAIQKILSWSATLKSIVAIKNVRIN

SEQ ID NO: 165242 - protein, 110 aa, Heterodera glycines
KASNFCSKASNFWLNSRLISSLISSNLFINFCSISSLNWSNSSIILSSIAFSFHLMTRGSKSLCSSEQDESALGAAFSAGMKGTISYRSSSGRHLLANVGIRGQFVIWGN

SEQ ID NO: 165243 - protein, 145 aa, Heterodera glycines
LGSPSPSSMPAGTHRTTNSCTSGPAMPSLISPSGTPGHCTSVDCSTWCTKSATNWPYGANATESASLNGFNSLAKDWDNCGNLATFFEGSASSGGMPRRRTLIGTHSINFTKVEHERVRPGRVRPKLEQRIYISVPRIKFELALQ

SEQ ID NO: 165244 - protein, 203 aa, Heterodera glycines
ECLRLSNGVRCVFHNKSCTKTLPNSSFRQSFLSIAKGETAMVSYQEHCTGTAMGDKDAVELRTCTLLTDCNNCLLQKGCGWCESSQSCLGSYANCADGLLGDRSLCPFGGAKQRRTDVVEQRPCSLATNCFSCNRLPHCTWFAIDTKHICVSLADEAILIEEHNRMQTERLSLAPMADDAPSTNVQQQSNPSSTLSPQSIISN

SEQ ID NO: 165245 - protein, 152 aa, Heterodera glycines
SDDATSTESSGIAFASSSSISSCCCCCGCSRVSLGGAASNATARRKRMPPRATAEFIVFCTKTTFWSWSSKLLFSFRSSCNLFASMALPRALASPLRLSPVHLQQPSLEHVSWEANGCTTFAAGMLERKALLSQTSVALAVSYSNTKFHDIM

SEQ ID NO: 165246 - protein, 132 aa, Heterodera glycines
ENIFHIDIDDVYIGAIGTRMVADDVDYLSILHGKLHEHIANFHFTLGFSGNFFRRGDAAQIQGDNILDINANKFHWFPHMWRHNHPPELSADYLLALMTRNRVFDENGGICANLSYAGSPQHSGVYPIYQAL

SEQ ID NO: 165247 - protein, 67 aa, Heterodera glycines
  unsure (1)..(67): unsure at all Xaa locations
QLAALVANNGSXMGKACFAVHDALRAVLPIIVGRPRDLGVMVSMGHNDSYARYYAXLKRGILTLKSP

SEQ ID NO: 165248 - protein, 101 aa, Heterodera glycines
LCSKWAHFGGHRKDDLREQIRELINDNLIVNYVNKLNGQFPMFPFELISDFGCPFRFLPQIVFWKDRRENPANSVGRECEGRAEFRATDPHDGTNEFGVGW

SEQ ID NO: 165249 - protein, 130 aa, Heterodera glycines
  unsure (1)..(130): unsure at all Xaa locations
RSRKACRHFKCGGHTVGAEAFNVXPTSPDQSEAVASRRYFLAWPCHNFLKFTKFPQILAEKMGIFLYSKSTIPKRHKTGIFCQIFFINNSSNVQIGPLKSGPHYMSTNFSVFCHFLLKYFEFVALNLLLF

SEQ ID NO: 165250 - protein, 98 aa, Heterodera glycines
ATKSGEIAAAAGLKSTSIADEHIDRITSSNVIQPPKDAAYLSRDIAPRVGVPVHVTARTVNRLCSSDYNAIAPGGQQILAGDSKVVLAGGTETISEAP

SEQ ID NO: 165251 - protein, 156 aa, Heterodera glycines
KTEKRRNACCNWRKRRGTAANRSRRSRASFAWRAAWNVPEGPSARMAFAVALRVRLLLARPLAIHLSSRCLFYPPFFSLGHTLFRNECLPPRALPISIEKIHTHSALFAPQSAVMDSPSSVGTNFDPNLQDPIPSKTVSPGAMCRLVFSLPMFHVY

SEQ ID NO: 165252 - protein, 43 aa, Heterodera glycines
QCSISYCIFVDNNFPKNPKISTKIGRDSRIGIPSKSPIPINPQ

SEQ ID NO: 165253 - protein, 74 aa, Heterodera glycines
LSIGYPIFTLIFNCPTLNFLQFNPLNFLAVLIFFFSSQNKHNEIPNTKHIFDCFLIMHSSKFDQSQFFVLLFVI

SEQ ID NO: 165254 - protein, 161 aa, Heterodera glycines
MVGLFLQQLAHHDNENCVNSARSPRQKKEHGQQQQQVKKMNKWSLANYLLHFKDHSLALSFVESLLNASNKVPLSDHLPSTKGCQLNWQSTGIRELRSEWIVDAALKLNPQIPRHLSKSLALNAISRIDLSSNQLCSVPHILFTHLSSLRSLDLSKNCILR

SEQ ID NO: 165255 - protein, 119 aa, Heterodera glycines
FFCRNPSAVVELVFADLATQPFALGSINSRIKAWRETVPFDLCLLFHNAGTVGEMAKKSSELSDEAQWHEFLQANLVSAILLNNGVYAALNNAESVRLFIVNITSLLSVKAFPSFTQYS

SEQ ID NO: 165256 - protein, 122 aa, Heterodera glycines
HHSASFWCPRTSRPIFVLFMYPFERRVSPHSAHINSREKCHEHKDSVVSMIGKDVPKLGGGGTPDDVPCQPAAIDSGDQQQQRLCDGIALDGISTGFPVKMLAPLLVAKGSNGNGTPFDIKV

SEQ ID NO: 165257 - protein, 208 aa, Heterodera glycines
  unsure (1)..(208): unsure at all Xaa locations
AFFVPYIVLFLLIALPICFIELSLGQFISLCPLSAWKMSPLFKGIGVSMVFISCIISIYYNMITSWAFYYMINLLKFPLPWATCGNSWNTENCSVWNKGAVETCRLLSGVILANGSCANFGENLATEFGKGNDSAVTSFTDGPKAGGVMPSVEYFQXNQVLMLSSGIVDFQTVNWQLAICLLISWLFVFLCSFKGIKTSGKVVYFIVI

SEQ ID NO: 165258 - protein, 194 aa, Heterodera glycines
MSGEGHYDPSRTDAHHNCISRPCYGWTVPENRRVFLEGDVRVDIFQKSQLKLFNVKQEKKKIGHIWFNTMFTCPGFCGDAYTHGDEEYSYPEAMIVRRCYKRNPRQPKNTEKRQGQHDDSNSEKEDTGRGRERSVPAANRLGGLRLNGTAETAIVPEKKRSARSPCRQLIEMESRNWQSQDGEEHPHKTHQSGC

SEQ ID NO: 165259 - protein, 177 aa, Heterodera glycines
ADDDSVCADIDRWACSSLEEEENCANGAFRQSSESTGRIKELEQQQQRLSESVMQLSTHFAQVQFRIQQIAKAPDEQRNEMIKQLQEFASRSCIDVGTLRPAKGSEGAAEEGQQQQRETDYRTAQMRQLIADLRQQLTELEQFAWQNGQLGPGELPLRELRSRQMLLLDKLREKIRL

SEQ ID NO: 165260 - protein, 99 aa, Heterodera glycines
IYISGKILFFAYKVCGELTTKRKRSKELRNGSPRDRYHSKELGFFYRSILVEKLATSRHFRENRVRTKKTRLFTTGQKWVVKCVFSPYFSGTLRATLLR

SEQ ID NO: 165261 - protein, 87 aa, Heterodera glycines
  unsure (1)..(87): unsure at all Xaa locations
LIPELFKVLGEKVEMERQKHGSQDRVPGGTIPFLWVXSLYVLGGLLHDRYLTPAELDPLSKRLLATEKRPPXEVQVVILAERPNVKE

SEQ ID NO: 165262 - protein, 154 aa, Heterodera glycines
KISLCESFAKLRPLHTHTEILILAGLCCLCVSSVIFLSVPRILGKLMDEMNKEKEKKSDFISKLVRLLKENPFALLVMLIVGAGAIGLRAYLMHTAGQLVVNDLRTKVFNSVLRQDMAFFDRNKVGEIVSRLSTDAFVVGYSVSTNLSEGIRAI

SEQ ID NO: 165263 - protein, 130 aa, Heterodera glycines
MGWPDWLQPHIDAFVLWVNGLLEYWHLGYLEYLVWLLLPIFIVFVLPIVFLFFSYGCVIFLRIYKHRNRIREAYASSVWDGARASIASFWEGVGYLWHGYEIDGLENIPDEGPGMIIAYHGPTPIDLYYV

SEQ ID NO: 165264 - protein, 210 aa, Heterodera glycines
  unsure (1)..(210): unsure at all Xaa locations
GALTYYGKFIKEMRELRSPLDELLKKDIKWEWSRQQQEEFEKAKXIMLSDLLLTHYNPKLPIIVAADASKDGIGATISHILADKSERVVEHASCTFTAAQKNYSQIEKEALGLVFAVQKFHRMLYGRKFTLLTXLAIFGSKKGIPIYSASRLQRWALILSNYEFDIRYVSTTAFGNVDVLSRLIANYPRPNEDILIANICNKTECFVNLV

SEQ ID NO: 165265 - protein, 136 aa, Heterodera glycines
  unsure (1)..(136): unsure at all Xaa locations
MVLFNGTAKIRVVEARDLQPTEWSKRFNQSDDPDSQLVDAYVNVDCDEYHVGKTVTRPKTKSPVWNEDYQTEVRNGKELGFTVFHDCALPPDDFVSNCRITFDHLKLMGVNDIWADLEPHGQLHLQIELXGKTAEG

SEQ ID NO: 165266 - protein, 183 aa, Heterodera glycines
MDNENFSSSNSKQQSRNGGGRVGSPFRNGYSNSGSNGKHGGSNDSRKRRTVIRRVNETASSSHAWDSSHVWLSGEEKSRLEAVQREWRLSRPKAKQQLWSKQQMGGSGGRVGSLMELTTDSAERKSLDALTESVASSSSVHPSPNSVFTRNRKVTSPPALAGDSVLKKSSPPAASSIFNSADK

SEQ ID NO: 165267 - protein, 81 aa, Heterodera glycines
  unsure (1)..(81): unsure at all Xaa locations
QHFKNKCIMVSSYIXFISYQKKGLYQGWAKLKNKKRNAKSEICETEKCEMKKKSEMRKAKICENAESEMRKAKFFLQLFNS

SEQ ID NO: 165268 - protein, 66 aa, Heterodera glycines
CDLWHFLNQFFIRFDDITQNFKKNEKKFFLKYYSVASKCSQLTIERLFILIAKVKSYGQLFFDFED

SEQ ID NO: 165269 - protein, 206 aa, Heterodera glycines
MSSNPALIKEGFVEKYKSGFLSSKWKSVFARLYSDSTLALYSDRADSRPSETIFLKNVIPYVCIGFMTDRMPVCCPSLPPGTAVQRLIGIGMDPRAEKVHWILFPSEQILEEWLNGIMSTLPPPPNPPPQQPTVPQQNIGFVPPPKYPDQPPPYGGQPIQPQQQSPYYPPPAAGGYGAQPQYPQQQYPGPQTVVIDRATTPSGGYG

SEQ ID NO: 165270 - protein, 129 aa, Heterodera glycines
LLSLFFLRFGFICFRMLFVLFFCHHFLLKIFFTMAFPIAFSIFGIFSVLFGNKNDGPKLRVKRSSSVASSASAAGAIAGGANANSNANNAFASFYADDDNTVLCCVCPAPMTLGDLKKSSSKKNNEKLF

SEQ ID NO: 165271 - protein, 160 aa, Heterodera glycines
VSPSSSWDRQGAAQGLSEVISALGDQFLSDNLPGVIRITESPTTQPHIRDGYIQLYIYLPMAFGDRFIPFLSKIIPSILKALADETEYVRESALIAGKRLITASSTHARKLLIPQLQSALIHENWRIRQASVKLLGDFLFFVSGVSGKMTSETTGEDDTM

SEQ ID NO: 165272 - protein, 208 aa, Heterodera glycines
EETIQNKWQKAKVFEKEAPEEDKSSTPKYVVTFPFPYMNGRLHLGHTFSLTKCEFSVGYHRLRGRRCLFPFAFLCTGMPIKACADKLLREIEQFGNPPVFGYQSSEEMSKNGTELAKQEEEVDQIIKDKSKGKKSKALAKTVAAKFQWQIMQSLGLNDAEIAEFSKSEHWLTYFPPKCMADLRKMGLAVDWRRAFITTEGNAYFDSFV

SEQ ID NO: 165273 - protein, 194 aa, Heterodera glycines
  unsure (1)..(194): unsure at all Xaa locations
AILSLFLFLIHILRYKRQKEKTPLVGLMESALPLLQERLSTLLPNQSQPSCILQKQILKIFYCLNHXMXNLQILSMDQFSKWLHLFLAILEREVPNECNTLPEDERAETLWWKCKKWAIKIIQRIFERYGNKGNVDLSYSDFATQYSKDLVLPVITSLMVHVLNNFINGHFVSDEVSYFTLSHLSDAMNQAQVW

SEQ ID NO: 165274 - protein, 139 aa, Heterodera glycines
MATYLFIAAAAFGAGIYCWKAYLGPMLDQPKSDDEEKPKPEGGEEATTAGDKEEKKAGSKGDKHKKKDKKGEGAAAAPAADKKEEKRKDKHRSKEAGKSDDNKAGKKDKHGKKDKKGKKKDTADASTVDEALGEQSTAE

SEQ ID NO: 165275 - protein, 86 aa, Heterodera glycines
NHTEKENNGIWIKYLIENRIGIGISVQDLIIIHRMAFLCEEWQEKALVFTNVQLSLTRCQIQLIYKEIMFEAAFALFYLPIFLFSL

SEQ ID NO: 165276 - protein, 79 aa, Heterodera glycines
TKSFTHAKKKITPISRHKQHDHRRGWQIKNRAVHQSVCCEPPRPPPPPGAIWGKEFGCVCDCDPFTAQPLKVPGGGRGD

SEQ ID NO: 165277 - protein, 77 aa, Heterodera glycines
IFLYLNWTWISGTKTQETQVQESPGLLEPGPGRAQITIIVKYFYNVFNYLTSFCSSNGIKKIKKVKNCISKHSNGLK

SEQ ID NO: 165278 - protein, 66 aa, Heterodera glycines
MAEFFGDEEAMKSILHAQNVQQAEEAMKNIKGFDVAEWDKVKLKHWEDGQRLKLEQVRWIENLLVL

SEQ ID NO: 165279 - protein, 194 aa, Heterodera glycines
MKLDESEAFRTLFTPELTRLSQLFEGHGFEIRIAGGAVRDLLMGTRPSDVDFATDATPTQMKEMFEREQIRMFNKRGEEHGTVTCRINDRENFEVTTLRVDVVCDGRRAKVNFTTDWELDAFRRDLTINSLFLGLDGLIYDYTGGIEDVKQRRIIFVGDPIQRLQEDYLRILRYFRFFGRFSQLDAPHEQKNLE

SEQ ID NO: 165280 - protein, 121 aa, Heterodera glycines
MSPSALFVCFGTRQKGGRKMPCTNCMAEYTRRRKEIGCAVCRFGFCERCVSQKCAVPSVSPTKPVPVCNNCYTLLTDPKRQCPQASRLGAEKSRDLPPIGVPFEQNAWGTDRLPPPSLRSL

SEQ ID NO: 165281 - protein, 116 aa, Heterodera glycines
FGRAFTIECDASKKAIGAVLLQENGPVAYISRALNRHETNYPSIEREALALVYAVKEFSPYIVGSGVTKVITDCSALTGMMKAKELKGRLEKYQVTLQSFELEIIYRPGKKKKKKK

SEQ ID NO: 165282 - protein, 208 aa, Heterodera glycines
MINTSMLLAIDLHNGRLVRKSFPLNSRIPTPRDKTTSWVADDKFFIFGGYGMSWHRLDHAHHQYFFRPHDFLDDYMGSCWNNQLLFYDLLLELWLEAPHGGTKPSARAAAASAYSATLNKVFLFGGRHDQTRLNDLFVFDLDQMLWTQIESSLPSEVSLSPGGLPPLRPEGRSWCTFTLVEAQKKILCFGGLDTAGRPLSDLWELDIA

SEQ ID NO: 165283 - protein, 212 aa, Heterodera glycines
KEAELTPLKREDILVFRYSRVSFGLTVSPFLLNATIREHLSLFDNDLAKRIDENLYVDNILIEMKADEQLKSVVNEAKSIFKAAGMIIREFYGTDIEGLKQLPAEDLAKELEETKVLGIAWKPKHNRIAFKLPIFEGTITKRTILSHIAKVYDPLGLMSPALLSAKLFLQEVQNANSKWDETLSSHLVKTWLKIVETWSHSGTPINVEFPRF

SEQ ID NO: 165284 - protein, 105 aa, Heterodera glycines
LLDPVNTESCKYLYPDPICLTLFPGSENIEELLVHFIMDARVLHVDYVVVGGGVAGVCVVQELCDLLERDEVAGTSNHRIVFISGAEGFVKRVANQRQVEMSVQA

SEQ ID NO: 165285 - protein, 44 aa, Heterodera glycines
SDYPPNWWRNAQSMAHWLSEMMPTLVQRLAGDFHSTVLGSDQRF

SEQ ID NO: 165286 - protein, 133 aa, Heterodera glycines
VPILKIELAFPYHGINVDINCNCVAGIFNSHLIYHYSRLDERFVQMNIILKEWGKVRQVIDPRFGKINSYTMTLMVMHFLQCGVFPPILPNLYALFPKLFDGSGNVEDLRYDVNIKPNLPSLSYFLGSWQFVQ

SEQ ID NO: 165287 - protein, 91 aa, Heterodera glycines
FDSNSAIEALFCASHNFSVAEFALCCQFGLMITIMKLKIQREAVVCVNCVQREQRMDGLNCFFWRKRLKRTAKEWPRHSQWALRPFFVRED

SEQ ID NO: 165288 - protein, 122 aa, Heterodera glycines
EGYITNYSPFANTFSYVCHISSSFAYIQFADVDAVNTSTSLNDSLFLGRQIKVMPKRTNVPGLSSTNRPPRGMRGGRGTGRARVIVKYIYPGMRSRGRPPRLADNGCVYILVQYVCFGKQLI

SEQ ID NO: 165289 - protein, 195 aa, Heterodera glycines
MTATSTTIVSELEEEEEKEQKIRAIVVLPAPEIIDARQGTAARDANEAMEEMAKAMREKTRDCAKLISAHSAVIFTANFLQSRVVINDIGGQLAKLYDALEVKKAEEFEQRMNELASAGDERRGRKIAELREAFREWETLLARLDVELERVAGPNIQTELGETGREIQLVSSNKMFKGGSLLSYVQSSSYPLMFL

SEQ ID NO: 165290 - protein, 54 aa, Heterodera glycines
KLLKNQSASSIKFQYKIFICAFIGLFIFFFIHTPKNQMLYIEWFSFLCLQNYLF

SEQ ID NO: 165291 - protein, 150 aa, Heterodera glycines
IENCLDLDYFKVCTIKVEGEQSTTTISVKSTEPTDDEILFDIHEKCGRVRAVGFAPDMQIVSIQQEDSVIEFVLLQEGKVVGTFRHNCTAKGADVLGVHWLSNSQVAFVTDLGCEFFCVYAYKRTLKMTQRLPQICLFVPAVYRTTFLVS

SEQ ID NO: 165292 - protein, 141 aa, Heterodera glycines
QRQQQAEEELEQHEPASSSAVPPSPPQRQRPTTPEAKRTARPSTEMATTEEQRETPKGKIDKERPTTQGTTPAEVSRTFILITNSTNKANSPSPSIKRTKATTTAPKVKPNNPDGDEPMLMEFDNGNSNILAESAVNGNSE

SEQ ID NO: 165293 - protein, 210 aa, Heterodera glycines
IATSCGILKPGEDFLALEGKEFNDRIRDEHGEVCQEKLDQIWPKLRVLARAQPTDKYILVKGIIDSKLSANREVVAVTGDGTNDGPALKKADVGFAMGIAGTDVAKEASDIILTDDNFTSIVKAVMWGRNVYDSIAKFLQFQLTVNVVAVVVAFVGACAIQDTPLKAVQMLWVNLIMDTLASLALATELPNEDLLKRKPYGRTSPLISRT

SEQ ID NO: 165294 - protein, 105 aa, Heterodera glycines
RNESFLETLSNSKKAKIVIRDASDEQLLCLVEICLNILKGRVPLRPRHLKKLKAHAQMLRRLARTRCSRSAKNVLLQHGDGLPAIVGLIASIALPLIANVIENYT

SEQ ID NO: 165295 - protein, 206 aa, Heterodera glycines
MSSSNRQQIYYQSRHHPQPHRVPGLSLPIASSSHHDIGSISPRHDHRQMVIVSGSDSCTDCVADYHSSCDCPACESKNLASVGHDAGLDDHQLYSYSLEPTQLEDDDEGIVHEFTTDSGERHVVIMTKNDEHFQEGITIQERVRRQKLSEAARSRYAQLSDEEKRAVTERRIIMRQRRKQKEREMEELEAILRASNDITDDLIPLD

SEQ ID NO: 165296 - protein, 217 aa, Heterodera glycines
QGMFRSATLSPNGRGELEKTAHDGRCPRYLFARPPLNGEETTKNKKKRVEEKPKGKEKQSKKEAKTDEKGKNKGNDELDVFASLGTLQKSLVTRDLMSRFCGQQRSSLAEEAIVSHSTKADKSMDNGYPLRGTNSFLPQSPSVGPRSTATPLTNSSGSSESDSSSLGRFRRGLSIGPAFSGISDSVEDPSLAEKITRNYESIFLKTLEQVNITRRCS

SEQ ID NO: 165297 - protein, 204 aa, Heterodera glycines
  unsure (1)..(204): unsure at all Xaa locations
GIGFGVPSIQQLPDNVLELIFTYVSPYEDYNSIKLVSRRWYYLATATLRRMNHFFNKCINFSWHFVEGDHLLSXRCSHAACFHPRHCVVYIFGGCTNTYTAFNDLWLFDLSRREWERVMVARPPLPSPKALASMVRFGDNLLLFGGFSKSSMNPIHQTNTFYNELHLFNTASTCWEEIISENTAPHLGGHSASILSYFMLGFGG

SEQ ID NO: 165298 - protein, 196 aa, Heterodera glycines
MSPSRGVGAVRGRCGAKIFFCFIFCPIFFKFFAASTAVEEIAQCFEQQYANRMVKFGALHVVRRVGIISPLGAFYLAHFIDEADTTKELRRYPSLRQRHLARQENGEILVIYSGHSAHSLEWARVDLLASALRLEPILDGDDFQPHVSPVLLVTACPAPAVSAPVSLPAPYSLKTRSSTTSGEEQQRMVNNNNITP

SEQ ID NO: 165299 - protein, 131 aa, Heterodera glycines
STHNGKGTDNRELIFPSLANCHYVKSKDNLYKFKDDFANNQEYITVMVYKNDGKRVYLPFDPKPILEGTRINSPHYLCQLIVREPGIQRFTLVIAQYEKMKTIYYSLRVYSSADFRCGNMPMPYKFHRKVG

SEQ ID NO: 165300 - protein, 102 aa, Heterodera glycines
MALIRPKPKRVRRRTADGGTAPTGVTDDGAVGIGGQAAQQHSHKKPNPWGEESYSDLIARALGCAIDGRLKLSEIYQWFSDNIPYFAHRSSQEDAQGWKVKA

SEQ ID NO: 165301 - protein, 57 aa, Heterodera glycines
NFHIKNFQRFSSLKFFFLNFCGDILRRTPIHDKGCASQTLIRRTFGAGGGCARTNFS

SEQ ID NO: 165302 - protein, 176 aa, Heterodera glycines
FPPTSDQAPPSLISGLWHNDAEASPDNSPLFDQHPWHPTDGAIPADHSSPPGHPWHSADAMPGHAHTTAVDQPTWDQQVKAMSDQRPPLGPDPQYLVTTATSINKHPPAAPQQKPSPISAPHSATLPRTQSTPSAAASRPWTPSTVIHTTINTTYQGSHGHHHQQLPTPPATPSPR

SEQ ID NO: 165303 - protein, 73 aa, Heterodera glycines
LIKYDHFFAVCCIVANSIHLKQFCDFVDRRIRLQLLHFDQLTDVVSFSHIMTEGVSKFECPNSILMPSLAMNR

SEQ ID NO: 165304 - protein, 161 aa, Heterodera glycines
  unsure (1)..(161): unsure at all Xaa locations
CPPGPKGSPGYPGEPGRTGKPGLPGGIGVTGGGRRRIRWPTXGGGQCAPCPAGPPGPPGYKGKRGFRGEKGAKGAPGSPGREGQPGEEGPEGEIGLQGEIGEAGPRGPPGEQGIGYAKGEPGPKGEIGPHGEAGEEGPPGERGEDSPPGDGVSRQILIFTV

SEQ ID NO: 165305 - protein, 217 aa, Heterodera glycines
STPSFADGTTAHSNGKDSLAEGQGHAKKPKLTQKVIISKEKALPLKQAIPNTTRTLKKLFNECKTDKEQSQPILKRKIPKSKVEPNGVTVKAEESTELCLQSVVHPHHSPEVPSTSGSMCYDSRTTIPISAWEGNQMERMDGDNDKKDNVNRIENLLPMVRGEFREHLEGLDEAIRQQNYPKAGEEVQALADSLFDADEFDNEQAECISLCLLHIFL

SEQ ID NO: 165306 - protein, 53 aa, Heterodera glycines
SLPTFSGDCTNYTSFWNTFKAGVHDLNIPNSLKFTYLKQCLSGPPLTLINSLP

SEQ ID NO: 165307 - protein, 119 aa, Heterodera glycines
KRKIIFAPHQLVRGWNNHWPQIKEKYDDVRKGLNTKRVEKIGEQVRQNVATDFSHESRWKLKQIVEEDKEEQNYLQQNQQHEKLKEEYEKQDEDADSDGRIDTEIRNGIFKGANCQVEL

SEQ ID NO: 165308 - protein, 174 aa, Heterodera glycines
IKIEYMPSGDYFRRHWRSLFWSIEQMVPLIGFFPLRLLVGWLLPPEIPLLTSQRSRRLFSPRQILQNFLVPLKALPKFTASLHQQFCVGFCFVFWFFLLMNHRPLSLPSLIFSQFDHLSFLLPFLPFYRPIFLCFSFYHLFYLFGQLFLSHFLCLFLSSDLSPLALPRFFARSA

SEQ ID NO: 165309 - protein, 48 aa, Heterodera glycines
  unsure (1)..(48): unsure at all Xaa locations
RTLMGSLNDTKKILGNTADGPPFLENCRENTFYGVFRVTDHEXXTHSF

SEQ ID NO: 165310 - protein, 202 aa, Heterodera glycines
QQQQQNMMQFARKHSSSSLAEQRMAMDRDHLDLAFHHGSTVSLYAGTGVRNQPMLPLSNSANRMVPLTTPASRAKQRKQHIMNAYFGGFGSALNKLAAANNWTINGVKMMGSNEEVSSSVEIHQNHPASGINFCPNPSQPLRQTRGTFSQRKLQNHQQWTARSVVGIYTDEEDEEEEDDDNVDEDADDDDDIADDVDVSTEE

SEQ ID NO: 165311 - protein, 99 aa, Heterodera glycines
THQFCRIFPGAVRFRADALCRRVGFVFVVRNGEHNPGQGGHRLQRRGDFGQSADHDCRPRWCEGTGPLALWLKPAQVKRLVRALFQNTERRAILLAQIN

SEQ ID NO: 165312 - protein, 153 aa, Heterodera glycines
EKMEVLSDEEEGMALSDLKETAKKNNEEAKRREFDRRLPIIHSYLGDVNQGELSGQEIKQRQFEEPGNTIKISVFVINEVCLFPGQKMPIQFHQRSGIQFVHNAHRQQNILALFTAEDPNFEFHNDEEFSSVPCHQTGTLFQMQNILENGEND

SEQ ID NO: 165313 - protein, 75 aa, Heterodera glycines
RLGCSRGSSCSRGSSCSCGSSCSRGSGSSRVGGAGGGGHGVRGVVEGVGGAQHTHGGCGGGAAVVGGPHAVGVAV

SEQ ID NO: 165314 - protein, 146 aa, Heterodera glycines
IFSNCFFMLWRRSGNSSSVGRSGGESFGQRDTMGQLSSAELPTVANAVDVQSEEPSTDSKTGPEIGNEAGRLEKLVIRPSQPIDICRAPSQNEPRNFHLQHLQKPMAQRLLQRSASEMTTAVPKCASTDRWASAGTQKGHHQPRVI

SEQ ID NO: 165315 - protein, 167 aa, Heterodera glycines
AASAAEAAPDAQSGEAHAAGIAYKIRLAVPHVLIFSTTILYNLFGALAFQSLERPFELAHLQKHSLAISQAQNALLQLGLSSASNDSSFAADDSAFNVTLMVTIDELIRVSMNAFEEGIRADEILLAGASHGNWQNLALPSVDGSPPLGHWSSDHHQHKSKWNFHSS

SEQ ID NO: 165316 - protein, 140 aa, Heterodera glycines; identical to SEQ ID NO: 134012

SEQ ID NO: 165317 - protein, 119 aa, Heterodera glycines
LILGQNWADGIHCYDGSALQNVWWEKVGEYAATFPSSTECKENSFSDTSGGAKNGKDKVFQMNGGGTLTIKDFEAERIVNLARACCNCKTQCQKLKFVLENIKATELKTLLSGLNKNYG

SEQ ID NO: 165318 - protein, 73 aa, Heterodera glycines
IFSVCPRQKKMAPSQQHLHKNLFTVSDFSFQSRHMDIHSSPSCFVLFSAKSAGQKECHHNAKPMNGNWLILKT

SEQ ID NO: 165319 - protein, 216 aa, Heterodera glycines
QKIKPHWMFTLDDLIRNAVQQAIKFLRPQEPTSRDEGFANSKQCSSVHQLLPVPQQSSLLAPASSFDLLGKAYTDQIKSLWDDLVSVERKLLSVLEVAFVERQERIRSLCTSASDLTPGNPNGVQQQQLWATLASQQTMGQGQMPNNGSNHQQQGAGGGTHFASPLLSVDDSGIDMERLSDDDEPLREWLLRIGCDDYSIELLERERYTKRDILEF

SEQ ID NO: 165320 - protein, 149 aa, Heterodera glycines
MKPLNLVRIILATTQYVSGRSFCLQILFKQTKDSNNERTNSPSCPIYFFQIYRNIKGVIDIKYEEIALFADVPGGRWQLLSGNFMPKIRFQCSPDWDELAAEKWIQTALEAGFRMFDLTFFSHNQGQISKAIKKYLPWFGLNRTDVFIT

SEQ ID NO: 165321 - protein, 160 aa, Heterodera glycines
MGQRPSMQQSEVARRPRAGSELGSSAQTTGSSSATAHIHNHRRANGTRSRQPQNDTSSPSSASSASPASAHSSRSFTEEAAEGVTGGGAAELARFFNQLGFVPVQSSSNRHRTSAEILIGGTSTSPSGSGGLAQPQQQNGDAASSAPSTSVRHASSSSSN

SEQ ID NO: 165322 - protein, 209 aa, Heterodera glycines
IRQLQNVVQNVEETVNEAQEEQLQEEAPPPLLAEAEAAQPTEEDAVDHVLLLKKDSEQFNNADMGLANTVHKIVKGGIQRVEGNRVYLKVAKEQLTEEELYKLIGYLDKKIAQPNNLYFDEFLYENGQLSFRISRLGVLQPNKDKKDGNADAALENASGVAQAVYKRRKDIQTLAGIRVDETGIGSGVYVVPVERSQRDWLFVPIMAVS

SEQ ID NO: 165323 - protein, 195 aa, Heterodera glycines
RSTANIRDTISPTQPDQVNWNDITSQLKQLFAETRSLFVRRFECFKIRQQQGQDISSLIAQINASCENADLSLTKEQLKCIILVIALNDEHHDLRQKALKMLDDSQKNGTDISLKKIEEELRAIQLVKESALSLVNPPIATNAIRTRCKFKRKANAWSTDASMRIMWQIRPLALRLHIQGRHLPQVQQKKKKKKT

SEQ ID NO: 165324 - protein, 79 aa, Heterodera glycines
  unsure (1)..(79): unsure at all Xaa locations
TPVVSCAVASLGCDAVIMNSASHNPKDDGGFHAXWAKEAPILSPHHAEICRIVSEEPKPEQGYCDIGQLGTSVFLHSDD

SEQ ID NO: 165325 - protein, 100 aa, Heterodera glycines
FITHFEMVIGHLRFGHLRSGHLRPAGNRTFAARQMRSDFCGPDICGPFLKGHFRTFAAGHLRPKGKSDICGHQNAKLSFLFQINYTKYFYLTHFTNYFVQ

SEQ ID NO: 165326 - protein, 67 aa, Heterodera glycines
PNSKRYFVALDKPVAELAKALCCSSTACSKVWKQYTFSNSINNTLTLRKFCFFLMRKKIKGCTNSGF

SEQ ID NO: 165327 - protein, 114 aa, Heterodera glycines
KKIKIKKGHQTTKKKAKNGRSRRPLRAMLSIKTGDRGASGGAGVWRWAPGAAVARCCICWECVMLSNISSLASSSTWVAVRPNRIEWRQLGGRDTRLLNEAVRRRRCTKETTRP

SEQ ID NO: 165328 - protein, 94 aa, Heterodera glycines
DQVPCSDQFESQINIHFSFCLFRVISLSVLPSLSFCVRLFTLQLSLPFLCYLIPISSDHSLPIHSFFCIFLCCLFVVFFTTIAPTHHHQFNSIE

SEQ ID NO: 165329 - protein, 218 aa, Heterodera glycines
EWLRCPFGWAGAPTTFQRAMEEVRQLCSATFFVYLDDCIIGSMTEDEHLKDIETFLKTMAEVGFRLKPEKCRFALGEIRYLGHLISEKGVRIDPKDLEPIQKIKKPKNITELRSLIGVLSYFRKFIYGFAEILQPIYELTKNESTTEWGQLHEQALEELKERLMTAPVLAPPRFGHPFVVETDASTKAIAGCLLQKNKKEEIHPICYFSRVLTKHEKR

SEQ ID NO: 165330 - protein, 103 aa, Heterodera glycines
  unsure (1)..(103): unsure at all Xaa locations
CLPTPGSKNIAILPRRDSDLEAFSHNPSDGSFAPLVYRPSTXTKCLNLRFLSYXQDYYHSNRSLXGKTNLSHDGLNPAHVPYWGVNNPTLGEFCFAMIGRADI

SEQ ID NO: 165331 - protein, 67 aa, Heterodera glycines
GSDQRTQQHHQEAERRHFCFLRDLLVFVFGDPFYGMIFFVGSAHFYSKKKKKKFQPVREMVLRRLIN

SEQ ID NO: 165332 - protein, 97 aa, Heterodera glycines; identical to SEQ ID NO: 149606

SEQ ID NO: 165333 - protein, 212 aa, Heterodera glycines
AGVDQAKVNVTVVGAESGQNGAEQFNLQRVNAGLGAKALLQFVNKLLDGCSSLIRQAIGFVEGGDHFVKPCRERMRQWHFVVVAVVCGISVHTAAIRIGFWLIGNPYPCVNALDQEVSNGTDIARSGWHNPNFQSLRQFVYRYVRILCRLLLPNRGLFLIRHPVVQLGTGQLQHAEPAFVQEGVVGETIASVCCSDEKHHLLVPYACGQPTL

SEQ ID NO: 165334 - protein, 78 aa, Heterodera glycines
NVTLFSTTSVFPNKTDDSLPSLLINDIEMMAHFNKSGAIGNTSISFNFTTNSSTNLLSHPNATDHHQMKLNPVLVDEH

SEQ ID NO: 165335 - protein, 150 aa, Heterodera glycines
QPNPTAFPMGSYYGVVDHQQFMSQPCSIPSENVQNDPSAQQQVGVHQLKKTQSMLFTAPSDMTHQQQFGCGNPSSVTFPSPSASFVHPSPSQDFSVVRTHHKHQQPMVRLPPSQQTPHAHLMHQISSQSLQFFGHDPLLAATLNPDICLA

SEQ ID NO: 165336 - protein, 116 aa, Heterodera glycines
RAPPPPFSLSQMNFAQNPTGHNHIPQNISPTFCVTFSAVLCKNCAFSIESANFLIHSLLLILSVNQRINFLNIIFLIFSIKKLKCCAAAFCFNCLYNYSPSLQQQSPAMSQKVIKN

SEQ ID NO: 165337 - protein, 97 aa, Heterodera glycines
TKATKGEAKGCGTLTETDGKGKKKIGGGGEAKAMDDRSDAFIRPTAEAQRRKIAAPMPSAVMGCRHVNGQLNLANYCDDFLPLNGQPNRIRTFISPR

SEQ ID NO: 165338 - protein, 190 aa, Heterodera glycines
FIVRAKRCTFCAFGGSLKNHTPTDLGEIAAAAAHKSASIAAEHIDHVIFGNVIQSSKDAAYLARHIGLRGGVPDHDPAVTDNRLCGSGFKAIAQGGQPILAGDSKVVLAGGTDSMSQAPFAERGARFGTQLGAKIEFEDVLWLGLTDAHANMPMGITAENLGAKYNGTQQDADANAIRSQNRWRLANNAG

SEQ ID NO: 165339 - protein, 93 aa, Heterodera glycines
SFSFLLSSCTNFAFSVGIRKALIGEGRSSRNPRGNCPRATMVRSSIRTNSNCGDGGKGHHLQGVRGRGCPTRAGTCQGGLTREHIELYVSKSL

SEQ ID NO: 165340 - protein, 191 aa, Heterodera glycines
  unsure (1)..(191): unsure at all Xaa locations
KIVLIANDITFQMGSFSMREHRLYQKASEYSRKHQMPRIYVAANSGARIGFASDVKNRLKIVWNDEERPEDGFKYLSMDCGEEESDILSQVESTFTDGRHRIDAVIGKENDIGVENLVGSGFIAGETSAAYREVPTYCLVSGRAVGIGAYVARLSQRIWPGGNSHINLTGAGALXFMLGREGYTSNNPFGG

SEQ ID NO: 165341 - protein, 47 aa, Heterodera glycines; identical to SEQ ID NO: 133285

SEQ ID NO: 165342 - protein, 189 aa, Heterodera glycines
IQALVVEEKNRPKFSLTEPELSPEQLRQLFPELSDHWRRALAKSPVVKRAAAIQEQEQKRVSKHRTSRYWLDEQLSPSEHIWLPSSASSASSSAVDTECYLGEKDCQKMGEKRRCSGCHIVAHTACFPLLAKMNLSCKMTFRDCAQSANAKSPSSMAARKQRHSKSEQNNGNELVSNNSTTTTTITTCS

SEQ ID NO: 165343 - protein, 78 aa, Heterodera glycines
DRWGRGFESHRASYLLCSTKVAAPKWPRQSDPDPNLTAIEYLVAQNFSQNSSMMPAYGTEGQNAKVPFFLNGKAHKWC

SEQ ID NO: 165344 - protein, 117 aa, Heterodera glycines
PYHPSLIYSFSVRTTAADAMASLLLMSRSVIGDFTHVSDANQPGRERDNGSNNGKLLTHLAKQRPKPARLNRSRIQPTMATVTSPTVDDEQQHCVDDTPPTSSSTGEILPDLASKTK

SEQ ID NO: 165345 - protein, 155 aa, Heterodera glycines
MIHLFFGRFSNRRLFKPFSGHYSSHFSEIYSKIPSNIPKFSPPIMSLPEKKAALKRAKDDLAQAERRHSRRPTPAVPNRPRPQLVLPANRSPIRRPTRPAPPLSFVPHRRRQLSPSPAPVCPVMRSSTPSPPNRPLARRRLLSPSPVRSARRQST

SEQ ID NO: 165346 - protein, 217 aa, Heterodera glycines
SNSRLFCLGRQRNIPFLMETAKFDPHVNWLPPCYASTSEFYAVNPLDQTDLEEESGKEIGTSQNTPSGEKKAESTGWGALDDERQHYKCENGIETITFPQQTKQKIDLDLPPLPYNMLTQQWISDKSIADAVEALIGAHLIQLGQDAALKFMNWLGIRVLTQRPCLRSSLDDHSLKSLFLLYNKFDFATVENTIGYKFANKAYLVQAFTHASYFNNR

SEQ ID NO: 165347 - protein, 210 aa, Heterodera glycines
FSDDESILKVVNKTLFQGKQQNSTVRFEDVEKVFGELIRLEEGVSRTIRQVNRKANNVQNHLGTLANEVNAGFQTFTDEISKVAGKVKTLENLTLANKNIQQAMAITQPPVPHLPVPPPVQQLVHQARQTLNQSQESSSSDDEDNDQQRNALSFQSVNMITDAYPMALEGYKDDCVVTFDRWAKRFREYMDAFGRKLDEKDKLARLVIYL

SEQ ID NO: 165348 - protein, 56 aa, Heterodera glycines
IHRLTFLIFLCRKKPKKKKYFICFIIFKTFFNLLLYLPLISNLQTIFVFYLFFLFF

SEQ ID NO: 165349 - protein, 46 aa, Heterodera glycines
FFFFFKGAGGKFYGIKSYLNSFYHTPTVVEEIESGKAQEGTTTWSV

SEQ ID NO: 165350 - protein, 77 aa, Heterodera glycines; identical to SEQ ID NO: 132494

SEQ ID NO: 165351 - protein, 201 aa, Heterodera glycines
MQPISATEFASLNMQQQTNGNSNAQQMHEGQNQQTMGGAKKIGASNSHQISHRLVTSVPNSAFGQSNGIASNALGASASASSFLLRNSKANCFLCDLPRMPWAIVLDYAEPVCRGCVNYEGAEKIEAVIESARRMKQVHATLSAGICPSVISNSVPMGPLDLLNGTSSQLRSHLFSAQPAQQISVNGNGIGLANAAASAHH

SEQ ID NO: 165352 - protein, 118 aa, Heterodera glycines
EEDDADQEIRRGHSRIRAIAMLSDPFSIFVNIFTPLYLNFPFLFIFSHLHNVFFNSTICPFLFNFSAIHICLRIFVSLFTLSQITFFHLAILSSHFSLCLAFFLPADFCTLRRRSFAS

SEQ ID NO: 165353 - protein, 128 aa, Heterodera glycines
MSAPFPGGHSSSNVQSPVTTPSRGQQTLSLAAALVQQQQQSGTNTPNVPQGMEQQLQQTDLRSLQLQQQFTALMQSQPQQPPAAHAHAAHQTAQQNVHQHHQQQQASQLSSAFLPHQQHLLEGTAQSS

SEQ ID NO: 165354 - protein, 99 aa, Heterodera glycines
FFLLNVCLFLLLPNVLTLPIANSFLSSLFLLLLQNNAFLSLSSVKFPFYHFPYFFIFYHFPFITNCSFSVCCPSAVCLFLLPYVFFYSTEKGQCNCEFY

SEQ ID NO: 165355 - protein, 130 aa, Heterodera glycines
VPASPGPGFFGPGKSRSRFCPKFPVPAHSRLEKSGQTVKASKKEGHRGTGGRWTTRHRLIRSDLRLLTNSPYIFALSPPVLHLLLEAERVVQQQLVHLLLVHLKGPFSEANRTETRAEENKKDRGNRTEK

SEQ ID NO: 165356 - protein, 59 aa, Heterodera glycines
VSIHYPAWNSGHIRIFATYRAHSNERINALLGVRIGLTHVNITLGSEFEMGINNMPKFK

SEQ ID NO: 165357 - protein, 146 aa, Heterodera glycines
MPNMIFSWDTAKDRANLYMVMEFLPGGELFAYFRALRKFSSTVVKFYSAEIILALEYLHSKQIAYRDLKPENLMVSIHGHIKLTDFGFAKVIQNKSVIEFVLHFFSFFLSLLNLPINPWPSSPGTFFQMIFRPIENRIIQKCFPIG

SEQ ID NO: 165358 - protein, 207 aa, Heterodera glycines
MEKVILADIEKAFLQLGVREQDRDATRFLWLANPKEANLEQLKQEDFRVFRFCRVSFGLTVSPFLLNATIREHLALHDTDVAQRISDNLYVDNIMVEVKPSESINQLVTEAKIIFESAGMRIREFFGSQIDELKELDSSELAKDLENTRVLGIEWKPRHDQLIFKMPLFTSPTTKRNILSHIAKVYDPLGLISPALLPAKHFLQIVQ

SEQ ID NO: 165359 - protein, 181 aa, Heterodera glycines
MREHNNCNGNVQEKKSVTFVSSRPSSSLSVASTNTNSNDSKQPFKRCPLKIDRYRKHLSEILHSLEKVAIFIGETACGKSTQIPQLCLQAPWSSEGTIVVTQPRRVAAKMLGTRVAQELGTAVGELVGYKFRFEDQTSERTRLVYMTEGILLRELLHNCRLNAYSAVIVDEVHERSLNPMC

SEQ ID NO: 165360 - protein, 150 aa, Heterodera glycines
MNPQNNCPTAAVIAQQSPPNAEPDSLFAQQSVAGEDIPWWQRNFLLQQPTLVNAWNAVFPTVVVNIFGIVIFLRMGWIVGTAGLFQAFVVLALCTLFSSVTVLSAIGICERCQIRSGGIYFLVSHVLGKRIGGAVGLIYTFGQACATALV

SEQ ID NO: 165361 - protein, 154 aa, Heterodera glycines
GRRPQFPKIEQQLFELVQHQLTAGECASNKWIRKMVKKLTTVGTENANGKRMKEDKEKEREKERMGEEQRGEDREAEGGKERCQFSERWLNNFKRRYGIQTTMEGTVNAEGDEETEDDEAERERRGGDTILVEGTLSLVIAGGVACLLTSLITG

SEQ ID NO: 165362 - protein, 203 aa, Heterodera glycines
PLSLDGRAGGSSIMTRSVVGALGNEIGTTPNRKNNFNKPPAQPTKQTPNSIKKQRKMANQGMIQTNEGMLTAGQNITKEVQQEKQNSPTLTATNKTNEGMLTAEQNIINEVQQEKQNSPTLTATNTSFYTAHESSSIGEVSMYEHVPLTENEPIITPPKSTTPPVLIVIPNQEEKEERRRHIKELLARTRQEANGPPNAQNNG

SEQ ID NO: 165363 - protein, 82 aa, Heterodera glycines
IRLLPVVSYLCKISKNFDTGHEANARIPIFSLIFFIYFFINHSLCNIGRLLACRLLNKWVHLHCSGQIFWTVRWHNHWFKTL

SEQ ID NO: 165364 - protein, 181 aa, Heterodera glycines
GGPHFPTLPALRDFIYMYRMDADKTLSQNYLMDMNLTRKMVRRAGDLTNAFDVEVGPGPGGITRAILEQPCKRLDVVEIDKQFLMPLQHLSNHSMERMNVHREDVLKFDFEQVWTDAGAAKCSWVEEHPNFHIIGNLPFHISTTMVIKMMRQMSILRGPFEFGRVPLTFTFQYELAKCVVR

SEQ ID NO: 165365 - protein, 68 aa, Heterodera glycines
HENANEHRLSQMNERCEFCDALHFAEEKIHGRGNSFKDCCHYGKVFVPEIPEQDFPEELRDLFMKFDA

SEQ ID NO: 165366 - protein, 125 aa, Heterodera glycines
MPTDDTNSYQEKLDEYFSKLSEKNLSILDELGMTKLTAEIKNLSEEERAILEATKEMGTEAWIQAYREIRLVCQFNYDVNRNRFVLNTDPRYVKRSKSRLSSLTFSVSTTRSLFNLKTRQDSCRT

SEQ ID NO: 165367 - protein, 80 aa, Heterodera glycines
DNRASEAFSAILQIKDLADSDAGAYRCAIVNLFFYGNANFNLKLTGFGSPPFVEKPQISSHDHGRLMIMEGEDTPVWKPT

SEQ ID NO: 165368 - protein, 50 aa, Heterodera glycines
VCFRPLIFSFMQNRWMKGLKKQSNKFRQLPMLSPVTNNDENCSQKSRRFS

SEQ ID NO: 165369 - protein, 102 aa, Heterodera glycines; identical to SEQ ID NO: 133836

SEQ ID NO: 165370 - protein, 221 aa, Heterodera glycines
SASSISVPDFVRVEEIPEECAIKRVPSALCSFVDPFCDPKKPVKTTFSDISTAAFNIRDGILRTPTIKSDALSSMFGVDLFFKQEYLQVTGSFKERGARFALLRLTEEQRRIGVIAASAGNHALSLAYHGSKLGIPVTVVMPKFAPLMKISCCESYKAKVILHGLNIQESKIFAYELAKEKNLKYVNGFDNPDVIAGQGTIGLEILDQVGDVDAIVVPVGG

SEQ ID NO: 165371 - protein, 108 aa, Heterodera glycines
FIFRWFSPNSSLFLPKFPRFSSFSSFCCFTSIIIPRKLLGRWRRNARPMGEKKLDEDTAERAGRKRRRGSICVSFQRHRQISESALWHSLLNHYYSFSHIPFLPPSTD

SEQ ID NO: 165372 - protein, 85 aa, Heterodera glycines; identical to SEQ ID NO: 131320

SEQ ID NO: 165373 - protein, 135 aa, Heterodera glycines
PVAEVPPPLPVPPGESSVEACEPMRFLRFRCAHSSESERSDRSVSVIWLSARWTTIDDEATLLLVGPPMVPLLVLFLVDAFYVVVLVAADCEQMDVAQKRCQMSSARASRRMMKWAVLANSVSALCSTGAGHHPP

SEQ ID NO: 165374 - protein, 206 aa, Heterodera glycines
  unsure (1)..(206): unsure at all Xaa locations
FFMLITLPLAWPIGKLLDCILGEDLVGMDHEKLLEMLRMAHQHSEHHEELAEDLKIAVGAMEIAEKIVREVMTPIEDVFMLSDXAVLDSDCVADVVRRGYSRIPVFTNNDRNQITGLLFIKDLALLKPNERLTVSTICDFYARTLRFVTDDTPLQTMLEEFKEGEYHLGIVLSENHNRVVGIIPLEDIVEEILQSKIVDQSEVVYD

SEQ ID NO: 165375 - protein, 59 aa, Heterodera glycines
PSKDPLKATDLVTAAAVLLALLANLNQMAILSSMPFLLAYAFVNYSYGSLAMSDDLDSL

SEQ ID NO: 165376 - protein, 135 aa, Heterodera glycines
MFSKVNFWVKLKMYVCVFKTLNAYQITDKKLHLILRDDEGAMKLATNLLGYNSMQCFAHKIQLVNKIHLILCIFGYFKAVGDGLKLLGGIFDVKERMKKAIRRIRKSRIIADDFKALQIENDLPLKTLQKVIKFK

SEQ ID NO: 165377 - protein, 188 aa, Heterodera glycines
GLLSLADRIDVLNSLTTEDRKLMVRLHSLEILGVSKVFDGIRTAYLALKHRKNRNHRQRIVVFLGSPLDPLLEEKETFIKFAKKLKKEKVSVDLVLFGEATAENNKIIADFVDLLNGAEEGNSHLLVVMAGDTKLYDVSLRSPIFAASGAALGARGEFGINEEDHPELAMPLPIPLEEERPPPPLSAG

SEQ ID NO: 165378 - protein, 84 aa, Heterodera glycines
EAGEIGSGEGTSNYSQENTDKPKRKRRTIEEIEQEKLNKEVNRICRQIQSAKNSKCEQFLFCHFSSKILDLDGFLFLQLKTLKY

SEQ ID NO: 165379 - protein, 148 aa, Heterodera glycines
LMHEHCPNPEGFVLANDSDYKRCYLLVRQTLKRMPTANVAVVSHDASHLLVLLDANGRPMLFHRVLCDLICSGDGTLRKNPELWRSWDPLTSVNLHKLQLPIARRCLELLDNDGLMGYSTCSLNPLQDEAVIGSLLRQSQRNSGTWGD

SEQ ID NO: 165380 - protein, 104 aa, Heterodera glycines
NGLSKNRNYAQKASQTILALPIPSTIAFIHPIMSAKIIRVPKIACDLSLEKNGLSKNRNYAQKASQTILALPIPSTFFFIHPIMSAKIIRVPKIACDLSLKKMV

SEQ ID NO: 165381 - protein, 84 aa, Heterodera glycines
KPIGRPRGSHSLPLAYLCLNVLELKFRKMLLAFRGGGKTLPTHSFILGSNFEEFKAILSSEALPRGATGENFMHILKKFMLHFP

SEQ ID NO: 165382 - protein, 127 aa, Heterodera glycines
  unsure (1)..(127): unsure at all Xaa locations
SGFATFKKVTNYELAILYSKILQLIIVAITTMCVCYINKYQKRYDCDIKFCNCLNEYPNCFLTKVCSPTHILNILFFRIYYAGQFIFLENVLKKDKNNYFILPSIDMHMYFXFLLLCKLLIYIYLYT

SEQ ID NO: 165383 - protein, 71 aa, Heterodera glycines
VKHLKQLSNRRHQQSNSGEKSRFLNNIWVNCKHFRHLDQPREIGLQSCARLTRHPQKANTHFKGKKKKKKK

SEQ ID NO: 165384 - protein, 161 aa, Heterodera glycines
  unsure (1)..(161): unsure at all Xaa locations
KFPTIVGHEGAGVDESVGPGVQSVRACDHVIPLPLCQCRECDVCADPTSNLCXKISLFVRELIWRVFYYWKWLTKTTKKSQTFFXGGGTTRFSCRGQPIYHFVGCSTFSEYTVTPEIAVAKIDPSLPLDRMALLGCGVTTGYGSPIKGCPIRAGSTVGVWG

SEQ ID NO: 165385 - protein, 209 aa, Heterodera glycines
MQQHPMHHHPHYQQPQFAYPPPPLSAPNAGTGAHMQQQPTPPPQAAQLHAMAASATPTGLFIYATNFGTFQQAAAAMGPVGEPPHQQPNELIGPMPGQHQQHPMHHHPHYQQPSFAYPPPPLSAPTVSTGGAHMQQQQTPPPQTAPPTHHQHVMPTALFGYNPNIGPFHPPPAMGPTVEQPHQQPNELIGQMPVRHQQQQHPMHHHPHY

SEQ ID NO: 165386 - protein, 74 aa, Heterodera glycines
MEEEAGWHPDMLYLFCIGLIVFIILFAIRQWIKGAQFREKVRARGAVAIVTGANSGIGKHLERELNLRYVKVYM

SEQ ID NO: 165387 - protein, 96 aa, Heterodera glycines
MLRYLRSRIGSSYQVKSDHFDDFVDFSKLTTHGFPQKASSMSVDEKLGYIAIGTKDGRLLIFCSNGAQHLSANFGSKLPICALYFVAAFCTVSNHF

SEQ ID NO: 165388 - protein, 67 aa, Heterodera glycines
FILFKRARSARLSSTKFKNELLAPVRAQQSLKRKARLSTKFKNRRQAPVQAQQRNFLRTITRFQKFF

SEQ ID NO: 165389 - protein, 181 aa, Heterodera glycines
NLEAEQQQKPKEEAGEEGTENEKGPPTDRIAGTDPWALRIGPPPRREDCCTDEYELLCVENLDELLSSEKQKPTNEDDDESAPPWRFGPAQMWYDRFGVPANPSNFDYGLKRRGTALSKRSTDDGTMPLPSEDDRNFLPAHFLHWEDDIIIDPEQAREKLVKELSSAKLPRCGWIPTPYTR

SEQ ID NO: 165390 - protein, 53 aa, Heterodera glycines
FFFFFSRTSVSRAKCCAKMPTFCLTTSNPVPAKWRAHAVSAQECKLFNFSVVR

SEQ ID NO: 165391 - protein, 68 aa, Heterodera glycines
  unsure (1)..(68): unsure at all Xaa locations
IESSFSDWNAFXFKHVKAYTDQEGANERMLTQLSAKQFIDKHNGAXKEGIVSFHXPGEIHIVYLPFSE

SEQ ID NO: 165392 - protein, 43 aa, Heterodera glycines
FYANSGSFLRTRADNIKARKSSARLCSLCTALGPTLYVSLILC

SEQ ID NO: 165393 - protein, 180 aa, Heterodera glycines
  unsure (1)..(180): unsure at all Xaa locations
SYTEEPHATRRSQILERHPEVKEFFGIDQSFKYVVVSMVLFQLLMAFFLRDSHWLLVCLQAYFVGGTLSHSLTLAVHECSHNLGFGHSKMLQNRLLGFVANLPMAIPMSISFRKYHXGEHHRNLGEDVVDTDVPTEFEARFFTGKVGKFAWLFLQPVFYAIRPFAIYRKSVTDMEIVNAL

SEQ ID NO: 165394 - protein, 81 aa, Heterodera glycines
  unsure (1)..(81): unsure at all Xaa locations
EREEKRGEREREREERDRXNETEREREKIKGERSEERERRERVERDERKRIERKKRGXMEKEKIKKRREKEKSRQRDERKK

SEQ ID NO: 165395 - protein, 130 aa, Heterodera glycines
LDANQAVNSTSNRVIFVMRLANAGRKQTRLGMTHRRLLRGVHSLLQMTRASAGCALLSSSAALALLLPDHVFLVVLQHVLQLFFVCPLVVLIFFVLIAFIALRHWPIVLTDRLLSVHQLLLLCLYAGLVQ

SEQ ID NO: 165396 - protein, 211 aa, Heterodera glycines
GVLFSEAEAFALLNDGELEARFEKAIGSLNILECTLCDSAKMKALQRRVQQKNGPCEEQQTSRVPSRAPTLSQTTADQQMLSTSHTTTTATSASSSFTVQSANLTRPESTSSAKSSTTRDQQQQQHGRLQPNTSTVASNAPSLLQQQQQSQRAAAATYRPNAADFVSKAGCIPQATTSASSLSSSNHLHPQAASIQAQFYQQLSQLNHSQM

SEQ ID NO: 165397 - protein, 200 aa, Heterodera glycines
  unsure (1)..(200): unsure at all Xaa locations
MGLRFYEKYFVLFGAFIGGCFLFSGILVYFGSDRINILPELQNRIINPKVRNVYDSQSIKQMEHRFGFASNLNVSMKENERRRNFTRNMMKFAWSNYVRYAWGENELRPIAKIGHSGSVFGRAPVGATIIDALDTLYIMGMNKEFXSDLSVFETNIRFVGGLLSAYALTKDQMFLNKARDVADLLMPSFNASPFGIPMSL

SEQ ID NO: 165398 - protein, 196 aa, Heterodera glycines
MLRKKITSRPTILHLVRLRAKHGGQQLLCANTHLYYDPKYEEVKIIQTLLCLRYIDKIRAQLSNDSSCQIQVIFAGDFNSTPESRPIALIGGDDQTLEMKPDEKNYETNAESLKVKAPFKSQLLSGSPDYTNFTCPPGSSLGFNGCLDYIWAHPPLRIEHIWPMPDHRLVTKYDALPSPIAPSDHLPILCDVQLDS

SEQ ID NO: 165399 - protein, 222 aa, Heterodera glycines
MYAFGLLDGIKAKINSPINLCSAGKESRGKNAPIKSNKVDGTPNKDAEKQISQLKQEYTNVFKNELGLCTKVKAHLELKPDAQPIYRKARPVPYNAKNAVDGELDRWEKMGVIGKVEHTEWAAPILVVKKVDGSARLCIDYSTGLNNALKDHQHPLPLPEDIFATLNGGQYFSQIDLRDAYLQVELDEASKKLCAIATHRGNYRVKRLPFGIKTAPGIFQSI

SEQ ID NO: 165400 - protein, 89 aa, Heterodera glycines
AKCPLILAQIWLISTSFGFDFCSSQPNVMPLRFRLSCPFQKQLFRHGRGIGKVQMMKSEQSNCRHKCKCKSTAVSKRHLISQLIDNPPN

SEQ ID NO: 165401 - protein, 58 aa, Heterodera glycines
LKTDQIAVVIFRFAVPTNFPLLYTPTDSVRRAGQGCPVTRSAALRQNEQRTTEKTNSS

SEQ ID NO: 165402 - protein, 154 aa, Heterodera glycines
ILIDVWAFTEQQRKGGATALDSFCSTNTSTPKVGTFRSLSTLILDILNPVAKRHKNALINSLGVVWMFRNSYGGGAKMADTCRCSFDYSAQQIEVANLALNLNALSLTSIICSVSDTLKESGNKTTKSSSSASSANSSEKLGVGGFSFLFKDED

SEQ ID NO: 165403 - protein, 119 aa, Heterodera glycines
RVVQEKAEKQRKLSAQLNKLLTLGSPISVNLLSISIFCSYASKIDVLHCYADLHKSIQQFLSSYGQELIQKVKFDCNFNIDFPSEFALSVCQPLGLSTLSFADNSSSHGIFLNCDPNSR

SEQ ID NO: 165404 - protein, 106 aa, Heterodera glycines
MKGAQSLRCAGPRQITAIGFDLGAVGCNLAIIIFVPNFMCGKCLHTVVFGLSGFDANGYQVHLFHMPKFRGFLKSALPERTNEIVWLQHMKFIVFDDTVLIRIAIC

SEQ ID NO: 165405 - protein, 220 aa, Heterodera glycines
MKSCSSSASTCSTGDTSSNTETAEEDKEGGGICSLYCLASCLGVPSELGFEFLRQKNALVLSGLTTHSDDALPFLRISTFDNVPPTILFYTKGAKVKKPPPHFASQLTWCNNSLLALVVRHSLAASHFKLVDESKKWIGYWGKHLKSPQYRTLKPFQKVNHFPGAFHLGRKDRLWLHIYEFMQRFEGDLFCIMPITYVLPRDARKLRLYLAGYTDRHVIL

SEQ ID NO: 165406 - protein, 220 aa, Heterodera glycines
EQLHHLGLFLAQKLTANDEKSRELALYYAHFYWRIRGDPLKSQQCLRLYLKRRPNCVAAKLQSGLVHLRIGDYPSAIELLQSVNSIVTNCVDCLMALGDAFVLDGNYKAGIQVFDMAFNTDPKEEMALKKASLLRCTLKLFEVMENQHKNLLEIIKDKEAYRDKTKRMQQLEAHIEQNRAVPEHRLQARLAHKFIEFGTFPYLKCREGTQWMNGIHERKR

SEQ ID NO: 165407 - protein, 216 aa, Heterodera glycines
REIVHIQAGQCGNQIGAKFWEVISDEHGIEPSGIYNGDSDLQLERINVYYNEATGGKYVPRAVLVDLEPGTMDSVRAGPFGQLFRPDNFIFGQSGAGNNWAKGHYTEGAELVDNVLDVVRKEAENCDCLQGFQMTHSLGGGTGSGMGTLLISKIREEYPDRIMATYSVVPSPKVSDTVVEPYNATLSVHQLVENTDETFCIDNEALYDICFRTLKL

SEQ ID NO: 165408 - protein, 132 aa, Heterodera glycines
SVTSAASTGIAALLLIGGGTVHRQFSVPNEVDDNTTPKMPFESAGAKRLRIVQLNIIDEISMLSKKVLRYVDRLLRDVCAVDKPFGGKVMVLGGDWRQLTPVVEHGTREDQVQESIKMDELFREHFQQIRYF

SEQ ID NO: 165409 - protein, 209 aa, Heterodera glycines
MISSSNSSVGTGGSKCLKNLDIVMESADEGQALLQDNPNNTTTITSVSAADGIPDGEGTSSSSAEQQQPNRTDSAQAQHAQPSTTMLKMKLISAISDDDDENKLATLKGRKKANQQQQPSRVKRSRLSVITFLNNITAPATRTDGGGGGKSWRRSLSVSASSVQQQKQPHHSHTPSSTSAEHSQMESDKQKMVPLTDSGTDKDGGGCSA

SEQ ID NO: 165410 - protein, 184 aa, Heterodera glycines
MGLAPVGSATNSLSSALSTSSLLSSSTIALHNISIGESSIELEELSREELIRRCNELTERCKMEIRSKNKEKQLKEETIKKLVVLGQQKGIIDTRNKSKKGEKEKRIWELAQHEKNLEINKYEDRYKEMQYALDSTRHELEEEYQNRIKTEEELRQYKDCFGQLPNSYLASANPHNNDRQRNQA

SEQ ID NO: 165411 - protein, 188 aa, Heterodera glycines; identical to SEQ ID NO: 127358
  unsure (1)..(188): unsure at all Xaa locations

SEQ ID NO: 165412 - protein, 93 aa, Heterodera glycines
MADLEAVLADVSYLMAMEKSRSQPAARASKKIVLPDPSVRSIMQKYLEKTGEIRFEKIFSQRLGFLLLKDFAENVADTSCPQIKFYEAIKEYE

SEQ ID NO: 165413 - protein, 89 aa, Heterodera glycines
RLGSGIGKGLRALWPIPNLCLVPVRILAHGRGMPQGRRRPTGSLHQVVNELRNGSLRHGARCEEAQKKEECRKHRRLGYGLRRRRGCRR

SEQ ID NO: 165414 - protein, 120 aa, Heterodera glycines
RAEFAGLPGVKGPPGQTGKQGERGKRNFVIGMPGPDGRVGKQGLDGLEGKPGQRGEKGPPGEDGADAKFCPCPSELNSVGGEAKANKRPLGQSLTSDQQKNAFLSQSLPFFCPIPKSTSS

SEQ ID NO: 165415 - protein, 140 aa, Heterodera glycines
  unsure (1)..(140): unsure at all Xaa locations
PPHRLLRPLHINEKILFRPGPNNMPPLFQEGLFLPMLGHMHPEFIEIMDDVKAGIQYIFQTENALTFTVSDTGHAGMECAIXILLEAGQTIFQVQNGMXRLRTANVVERLAIKVHRLGVPAEEVINMDALAEAADYYRPH

SEQ ID NO: 165416 - protein, 216 aa, Heterodera glycines
PVIIFLVVHVTVGHFFRFPRGFVPLFLLSECVRKCRLYVLCIERCADAEHVAQLAARHMVPVVRVLLASDVRQLRGADAAHGAANLAQRMAEQRRRRLQMRKTLSQRNLHLILSKCSFCPKDGHHHSHDLSFTILITFLSREVPRIIKYAKCQQRMTNVMDDDEENCSGIYSFEGQALKKQWKGKKGQFYFQNVHHSNNNFFHFKLFSFLVTQFII

SEQ ID NO: 165417 - protein, 91 aa, Heterodera glycines
VLHRRVFGGPLHGQTSGQFVGICHGLAHRRGRGPSSNVPLLYKCHPFLQDTTFFELKVCDQWAFVGDYENEETAPLVNVYRRHGTQNNNNN

SEQ ID NO: 165418 - protein, 155 aa, Heterodera glycines
SANDKIVKHCTVEGGIFSSDHLAQLFVLSVPEIRAKPKEICLRRFTPSNVSHLNAVISARLSSLSLSHFSINEKCRAFNSALLNALNECIPIKKLLKKDLAPKYPQHLLASIKEKAKLYRQCKIDPTKKALYDSITLHIKIQTKKIHNLIEHKAI

SEQ ID NO: 165419 - protein, 110 aa, Heterodera glycines; identical to SEQ ID NO: 151655

SEQ ID NO: 165420 - protein, 206 aa, Heterodera glycines
TDPGSNKTFPSLVHLPKTTLPTFSGDCTSYKSFWNSFSSAVHDQSIPDSLKFVYLKQCLSGPPLNLVCALPVSDASYASAIDLLSDHYDDPEEIARALQNSLRKLPRVRTGETFCSDLRSLIEQLEAICVQMGQQQQPHNTINIQMEVEQRLPRYILDEIYLARESAGQWSTDRLRDKLRSILKRKEQIDTLLPKTDHGPRPKSSP

SEQ ID NO: 165421 - protein, 180 aa, Heterodera glycines
MCGIWVILGAEYVPTKHQREFLQIGGRGPDLTIISRVSSKVWLGFHRLAIVQPGDSPSEQPICADGLSVVCNGEIYNHRTLKDNSLLDNSSVRNGGSDCAAILHAFRSSGNDLRRCCASLDGVFSFAMADNKFLYLGKDPTGVRHPLIWLPWTKLLLIGSRGLKVLRTLWGKGSHFFPPG

SEQ ID NO: 165422 - protein, 124 aa, Heterodera glycines
SSSKMVRKWSSNNCHLCFHLLSMSRQRKGQRWIGLSHFSLSLSFSLTFHKVWVLMGRPSLVLVPPFNAYLGAVKGGRQAFLRVGPPIVFCFSFLSFSLTFPNIWVLMGRPSLVLVPPSMLISEL

SEQ ID NO: 165423 - protein, 179 aa, Heterodera glycines
MAEKKKKREKNSGRKGTDDGVDSNKLTKDEDSLARFLRFNCPTNSTMFEGNEVHYFSGRKAIDVLVESKKYGATAKTPKFLNSDAAEEFLQTLLAKGLFFRAKKLVPKKKEKPSSDQQQKGEKSGRDVSKSPPNAAKAEKRQRKEAEEVSKTEEDEAREEEEDEEGQQQEKPEANTKDE

SEQ ID NO: 165424 - protein, 131 aa, Heterodera glycines
KGSADAYPGQLQPDLYRRRGSVISVSSSGGGAQVVGRVQLQLSYDHSTSDVVIRLAQLNLHPSSASLGQCHKLLLLCTTPCSSSNNNGTNCSEETMGTARVGRRARETGALTFDTPKRTVQQFAKRVPIIS

SEQ ID NO: 165425 - protein, 102 aa, Heterodera glycines
VISISKSAYCIIVLFIIPPPIQIRVVFAKNPPDAFTTCKSFPVLTPNMDCPFPGWLIEARPFSVVKMLADYLSLQVDPIIIQSEIGNVNWGHNVRGGEVEGG

SEQ ID NO: 165426 - protein, 167 aa, Heterodera glycines
VTDGRGREAEDGNEAEEGTVAAAGDGGVVPWSEEGRGGAEAENGDGLLLSPPAAFRSATFAEPSAAVVAEVRPFRRPIRRMMRWKTVFRAVPTLLRRRVSSSPFAPPFGSLRPSGVVPPIAPLPLPWAFPPLPPPWPFCVPRLNSPPLNSRPIAGPNRWNGPIAPIH

SEQ ID NO: 165427 - protein, 76 aa, Heterodera glycines
SSVHYRDMNINYFIRIRSLTGFFAIFELLHSRTRKAFRRCLGLFVTAEHSTLMTPSNRIKNGRSGRRFRLMIRHFQ

SEQ ID NO: 165428 - protein, 179 aa, Heterodera glycines
SLVLFNPLRSCFRPTRDELFRAVERLRESILLMDTERARFRRSNGALLRMIVRLSGGIPPNFNHAHFAAAAQPVVNVTAVLANANPTGQNYQRLLNLNADLTETIARLTVEISQLGYMNEQLTEQLEHLTEVPPNANFNLDDVVFHPPLDQQHEVPPNPNFNPALLEFDDVGLQPALDQ

SEQ ID NO: 165429 - protein, 77 aa, Heterodera glycines
VMSNHPHSLSIGQPQQKSRRQRWCGDGPFLLLTLTMSIGGALFCLFVAIWAVGIDVVFPLSLLLSASLGFLVASSLG

SEQ ID NO: 165430 - protein, 199 aa, Heterodera glycines
MTNSGGNYTPPAQTQPNYSCQHQSPYLAHSQRLSAHPSPVPSVRPLSQTPSSVHSMNNATIQQQQQQQTQFNQTATHSYEQHQRFLADQRLRMLDFQQQQQFVASHQSVSVSTFQQRKPREMHSITFHKGSHGLGIRVIGGNQSGIFVSAVQENSPADKNGIRVGDRIHVVNGVSMVGVTREEAFDFLLSTGEQPISIT

SEQ ID NO: 165431 - protein, 140 aa, Heterodera glycines
LPPPPYLRYVLDVVVTAGHGHRHSVPKSTSLPLLLPVHVCLVAVLTVFFCHLLVRRLGKMLLRPKLSSLLLLSSGGGGGTKHLAKKTTTAAAETRTNKPKLLGITTPAAEDDNWGKVTQSDPKDYRLKVSTISAVYARAA

SEQ ID NO: 165432 - protein, 185 aa, Heterodera glycines
SSRFSRLLFSGHRTLLWLFGCSLYALYWAVFVKPTVYSSVYFGWFFFPFVGYRPDNQHEFAVQLHTFHDILVAFLCPGIYLIFALVLCASSYDFNTMQKKTFLQVFLVSLINTLTGSLYVYMQHNDLRQQWMLTLAEFAWFHAHGFPPVIYLALNKTIRKDSCSLFMKVFQRDHISSVGVVAVSA

SEQ ID NO: 165433 - protein, 113 aa, Heterodera glycines
RVRLEMGGRQKRHTERGREKNEMKCHVKFKFGILTTVCLDNGLIFCWHLSFLTLLRRREVTAFFHSAGAEQSQLTGRKVKPFRRNKPNPPKFCCWPTATLTRATASKWEECVK

SEQ ID NO: 165434 - protein, 119 aa, Heterodera glycines
WLKRATRRRNTKGPSPSFDELRAKISSEQAENIAKIQLQHQKTVNELEKHVQKLGKKLAEQEEKHRRELAESASQSTNRLHKELESRNYELQMKNEEMFKLRQANRELQFEVDKLPEKE

SEQ ID NO: 165435 - protein, 194 aa, Heterodera glycines
MSTASPSPASSASASSSHQNRRPFSISSLLNPSQNATQKCPPLGSVAAFSDALQQCLPMLFAVRGMIGEGATNAMPKEEASAAPFRNAFQPLLMGKVRMCQEGAKEEEEEQEENGHEVPTSEESSQSEDDGILAKDGEQKVEMKDEEEEQDFGESELKMEQEHKQMKAEGKREGDEGDKGNTTPREGAFEQPYQ

SEQ ID NO: 165436 - protein, 56 aa, Heterodera glycines
EHSAASRPFFNFVENIQPLRGLRTGASRPFFNFVEDIGTLRGLKTGASRPLKCTEN

SEQ ID NO: 165437 - protein, 149 aa, Heterodera glycines
RRGDEKKATRKWKEMALRARFKPNLMDNSAETIRRPLAATSTPTSSRRSLTINALATTTTNGALKISKVKREEEKEGTRKSARSSSTTTETINSSSTRSGKLPGTPQRNWKKGATSSSAEVAQATTSSSSMLRNNKKQNHREKQQSGKR

SEQ ID NO: 165438 - protein, 129 aa, Heterodera glycines
MYNTVCSLRQQIGTRGPLFSEYLAVANTSVPDFHKLTFALLSGLPNEVSFGLNILTVLSHPGPFVLNFANCPQLIALLVALCGVCVNVEGPSNPFLLFDWWRRSSGYDFASFWANSGVEEAQRAATAKD

SEQ ID NO: 165439 - protein, 118 aa, Heterodera glycines
GCDSKSVELYMFGLFSSCAKVGLLRLALVNGEAERKSGRRRRPQQSAGIPPQGRRTERLAAAAHLFDGRKRCRLRRGRGKYVRFSLLLSLITLFLSLLLSLITLFLSLLLSLISLSLS

SEQ ID NO: 165440 - protein, 54 aa, Heterodera glycines
FFFFFDISPSANRSECQQKRMSKINNSQSGNKALAATRPTFGTAKFNLAVPLPF

SEQ ID NO: 165441 - protein, 180 aa, Heterodera glycines
MEVQYNRRHVPRIKWNLAINSREFSLDKLCVDECFYKLPFDELFAKDEPNSKRCFYCKRFVEKRMVSCDFCDASFCFDCPNPPFTALPNERFMCSLHIEPFIDANLLDSKRVTDRIALWKRYTELPKSETPFRSVISCFYTKVREDNTKQHLKLKSMTTKKQQKTINKPFKIESLIKRAY

SEQ ID NO: 165442 - protein, 209 aa, Heterodera glycines
FLLLPILLLHLQQSQACFSRGNSGEPSDGNPEAQGLKSENDVRTVQLKKEKQTDETEEEKDEESSAEQKLPSELDPEFVKTYLREFGHLKHNENGLSHGVKHFQRFLGYRQTGNVDLATLQKMSWKRCANSDEGYTAQDPSQLWERSTLFWNLNASHPKQFTHGETKELIAQAFRAWEIVIKIDFLETNNADNAQIIFTFESDGAKRKK

SEQ ID NO: 165443 - protein, 164 aa, Heterodera glycines
CRFCWVKGTAGANDKNGRVNFDLQLQLLAHVNHVLKDCRRTADFGGLNTSIVHRRGMARKHHLHRFDAAHTDASPVSLRNKWEEVSGKSIRGVLIRWPQRLWPILGVAMRFWNLRSSLCPSVVWRSMECCLSVVLLRPPPLADLSVVPRARGLNDGGPGTGERV

SEQ ID NO: 165444 - protein, 149 aa, Heterodera glycines
MIVLDESGQAPFVQVCSVLSPLQEVQKLFITGDRYQLAVNMKDIPEQLRVGFGFDTVLLNTDSSAGVEKTTLEVNYRSHPEIVNGVEYAAYTPHGERLRSGPGIFRMLTSFAKIPIAESPIVLIHQDSPMEAGVFLRPILVKLGLSLTF

SEQ ID NO: 165445 - protein, 177 aa, Heterodera glycines
FSAATDIHLAEKGIAAALSSCFLKNRIKMEEFAIETTLHILDNNGRTVVATFEHFLDNKRKFVDLVEFWEEDAAIQARLKGVRKNCANGRILEVNKYVQGGVFQARILLAYQTAKNHDSDGDFEFICEGHEVVLNTCESATAMVNRMILFYSNSFSSISSEQSGTGQIWRALLSSSD

SEQ ID NO: 165446 - protein, 80 aa, Heterodera glycines
FAYFDETHSLISVILLIIFQQFLFIFIIFKFIFIIPFYTFNWSCDGTGKHSLNISTHSSFPIKLKKTKNYIFSPISRVPP

SEQ ID NO: 165447 - protein, 31 aa, Heterodera glycines
ANGKKPSDRRKSNPIVSPVKTDRTLGRPKIG

SEQ ID NO: 165448 - protein, 169 aa, Heterodera glycines
PNDDCYDYHLIEHAPAPMDARGQRQRQPICQWRRVCRDCGRIAYQGKHQCPRQQTADNGNCRRCDGPHTAEEPCFIQPICDLSARQRASVAVDNDDNSDDNGDDDGEDDVLPLRLCFFDAETSQDSPLQLNNRLVQKHVPLLIIAEVICERCLQVGISVNDGLGRRAPG

SEQ ID NO: 165449 - protein, 206 aa, Heterodera glycines
VMLSPQSLLFLFLFLLAFLFPSAQCLTLKRQKPSQLNRRNEELNAEKALNRTVAKLRTDGENGRLILLVCRGKCLKERAQIPNWLREFNTANNRSFLKRNNDKSISDEQSDQSVSDQQKNNASLGRDDELQKHWEGGVAFHFYAHRLPIPVMDIETALRQHSSWQSVLFYVVAGKAFPAAPEAVIREKNTFLDWLNSFEKTPIVRI

SEQ ID NO: 165450 - protein, 94 aa, Heterodera glycines
IFIKILNTQMEIGRNTNLAQNWREWQQTNANCQFRWKSIANSAKSVAKQSHRIRRHYNRVMPMFRDSIVVMFLNTIAFRRLRQLALLLLKINDW

SEQ ID NO: 165451 - protein, 176 aa, Heterodera glycines
QALAPGPLHSAPTIRPTINLPALQLPDFDGHESNWPSFWAAFCHTIHDNQSLSGAQKLTYLVGRLRGGARTLVDGFALTDHNYPIVVDLLKGRFGDDNKRADRLRSELFHLSKPTGHSTSLRGFSEHVDRICRQLESLGSDLDDNPFLTVAIKEKLPTEIKAQLYDKEMEEGGPWT

SEQ ID NO: 165452 - protein, 197 aa, Heterodera glycines
MAHNQSESSTTDQKTPPEIDERAAGTVENSGNAAKKGGPPLAKCSVSSSQSSGGDQTDVADPPQSVPFLQDIKLIPTTTSSASSSPAFSQLSEQGDYRTPMAMIVKTEMDTNPKQQIVENTVAKAIKFYDNEIDGMNSKKRDAEMDRLKQAKDAQAQNILALNKLPFSSCPDRTSKESFVKKESVDSLAAKRPALVL

SEQ ID NO: 165453 - protein, 120 aa, Heterodera glycines; identical to SEQ ID NO: 140849

SEQ ID NO: 165454 - protein, 113 aa, Heterodera glycines
KIGDISDHWSDHFENLYSPLPSAFISFFHPYLLVSFFVSHEPTIFRDYVVRHPLRFIPTLQLLIRFLHLLLHFVHFFARCLLCHLVALCAAIFRCSSKRREGKEKILINLNYN

SEQ ID NO: 165455 - protein, 107 aa, Heterodera glycines
STARRLWHSDGRGGKEFVHRNGGERPERNEGPELQQIVQSLEDRERKLIRQNFNIEAVYYQLKSRYIMLLNHFQPSMDRQKRLPVEPSMIQELIDEVTRPHSPMRTH

SEQ ID NO: 165456 - protein, 52 aa, Heterodera glycines
IIAIKMRIKMNSIIFFFEGQTNPGTICEGFANPFEPMRTWAPTFRDSHMACG

SEQ ID NO: 165457 - protein, 135 aa, Heterodera glycines; identical to SEQ ID NO: 153667

SEQ ID NO: 165458 - protein, 201 aa, Heterodera glycines
NIQMKSIDSTEKENSFGGGAEFGHSLFVSGIEQRFSVFVSPGTASLTAPSLLKLSLVQSSDGSIEFLNSDGNWTTEAQFLIPPLDVEEKHRILVRMCKGIDRLETYQSEQKNEGQIEEKCELKFEWFAASDCKSLLSDDFLIIRRSFPITFRPIMLLSWRTSFLSDRTLFHVDISRKDCVSAAFAVDVFPTFVSLLSLKLI

SEQ ID NO: 165459 - protein, 78 aa, Heterodera glycines
FLVEFINCTTNWHTWTECGDSNLKKINCGTLNGQLTCWSVGSLFKKLCYITFSIVMVKRTRKNTVFFVEHFWPNFLET

SEQ ID NO: 165460 - protein, 215 aa, Heterodera glycines
NDEDPECFSFYENLSFSPDGINLLAFARNARLGSHNASMALCRFKWDGAVSPANEQAEVLIPTLDSPQLVDIGRQSVPFPGCFDPSVPLRAWSRDSRFFFFTTVWHNKTKIIRVDLHNGGQWTCIPTEHLEGRKFSKTRQMERDRILFQRQRFPTVASIHHQPATSSASGVLVPIPTTDGAAAVPGSAGGYQRRYSTHREQQLQQRNRRDSKFSR

SEQ ID NO: 165461 - protein, 179 aa, Heterodera glycines
  unsure (1)..(179): unsure at all Xaa locations
KIEKPNQAAGMPAMSAAASEADLRNDLMRLIIGEEHLLKIKAQYLDERTALNLRRPVNYIEVEQYFQNKYGRLLNFYYTTSTRELMIQIHNQQDLDQVIQLHESTGGNQRRMRLILSQKRDQPAQVGPLFDQQRPPPSSPSPLGIHRNSQPNCGNDRVAGNRNIVEAPLSSCSSSVWSX

SEQ ID NO: 165462 - protein, 107 aa, Heterodera glycines
NMVCADPPPPPLFPILIRESTAVLCIAPRITIINRRTHNSNGRGWGGDRYVQKVHICGWAEGGGEWRLNLGCAMFLYDGRDNQFLLHIPAADEQQQVSFPEQFLLLL

SEQ ID NO: 165463 - protein, 179 aa, Heterodera glycines
ERSKCAMHQETIRNCELRVSWARPVNMPPLPFFVPLPLRELAMPDPPSGLPFNARPLTEELRSFLQNYGDLPKLGVPLTEEEGERDTQMLEDYKKMIENATVRVVIPTERPLLTLIHRVVEFLVRSGPLFEAILMARERQNPMYRFLFDNHHPTHVYYRWRLYTILQGDDRQKWRLEKF

SEQ ID NO: 165464 - protein, 131 aa, Heterodera glycines
LKIKCNFGEMLCQIGTVGKNAKFLMHIFILFESGDISRLTIRPIKISAHAITVKWYAISRGCMENIPIHKYLLFYTLATDDYNWKKKKVNLRKGLSAILTTCVNTIFFWLVTWHLRWSHSKMFQERAIRNI

SEQ ID NO: 165465 - protein, 217 aa, Heterodera glycines
  unsure (1)..(217): unsure at all Xaa locations
ITASGLQVVRNFDEVAFVQNLVYYIETGYRTPXDFGTWERGDKTNQGIRELNASSIGMAKAALQAINDIGDLFGDGSNGSIVHVLPDEIQQCSAVLCNMLPHESFSKETDAALLSVISFPAFAVDDFSLATLTRETILATLGGRYGCKRFLRDGYKTVLEDPNRLHYINCELQKFENIECEWPLFFCYLYIDAAYRKDEKAENAFWKQLQTLIVADS

SEQ ID NO: 165466 - protein, 99 aa, Heterodera glycines
  unsure (1)..(99): unsure at all Xaa locations
MYRPSQTPRLTLSSARVAXHRVARLNTKMDTLSGALPFYRLSKESMKVVVFHWRLAAPTYATPLMILHKVRLESSSTGSSFPAKFAKPVPLAVVSLDSR

SEQ ID NO: 165467 - protein, 150 aa, Heterodera glycines
  unsure (1)..(150): unsure at all Xaa locations
MYMQCNSGLVAFLICVLLTFVFLFYNQFEFDITFKSIMLMVEQKPSSFFEKVIVHFDLKGAAPKPHYIKELLPFIKKLGFTEILMEYEDMFPYSFGLSXLRRKTAFDEMTTKQLKESANAIGLNIIPLIQTFGHFEFALKHQEFFSLRED

SEQ ID NO: 165468 - protein, 132 aa, Heterodera glycines
MANNAGSETAADEPFPRAFFEGKGTATLCPNDSKIFTVASIDILPPSETTPAICSGHIGTISAETVSFPLVVAALRPLKRVRFADDCGQCLETVRVMTEPSDYPPKISPAVLRRIRRAAAAASSAIAAAHSA

SEQ ID NO: 165469 - protein, 142 aa, Heterodera glycines
  unsure (1)..(142): unsure at all Xaa locations
MLPDPRTGDRKPIPMPRPRPRPRICAPPAPXPPRKKRPLPRPSPNPPPPPPINANAPLPPAAPPPPPLFALPKPPLPFPLLPLSIPRLLPVDELSITLTILTSLSRSSNRISTPPPAVPPFPIAWAISIAFLTPKVISSSCA

SEQ ID NO: 165470 - protein, 201 aa, Heterodera glycines
MIRPNIVLLITDDQDIELGSMAFMPKTLRLLQQRGTEFRNAFVSTPICCPSRSTILTGLYAHNHKVMTNNGNCAGEEWRSDFEKDTFAVYLERTGFLTGFFGKFLNNYDGSWVPPGWTKWAALVRNSRYYNYSLNKNGRNEWHGNRYENDYLTNLVANLSLQFIDESVLLNPHGQPFLVVLSFPAPHGPEDPAPQFGDLFE

SEQ ID NO: 165471 - protein, 71 aa, Heterodera glycines
KKRAAKKGSFKRQKSRRLVAKIGLFDENLLTNQNEITKKNFRRRLSAAGTPPPVPQKYLGKMRRKKKLLKT

SEQ ID NO: 165472 - protein, 82 aa, Heterodera glycines
HRHIFYFCRFLRNIYIYFIFAAFYEKILSSNLVADYNGYSIFEDLQLGDPTFKDPTFETNSMTINQGDLWVKNNLKSYLIFI

SEQ ID NO: 165473 - protein, 146 aa, Heterodera glycines
NYVFFAYMNSPTNFNNFHSTTKCVPLENGSDREKGSTSNNNHKRRKDNVKSELIDNAIGSPKSNKRAFFSADCALNPTALAEMMPSSRLSMGMAGRLRDIVAIFPQNDLASPGKLLFREQMTNSDQRVFSAKGQADVPGMNAKEIS

SEQ ID NO: 165474 - protein, 116 aa, Heterodera glycines
KKNEKPSNETKSHEKEIFKLRKEKRAKKKRKRKAIKKKINFKAKKKKKKKSSPSIKKCQFKCCHSHKKNFRSILIFYYIAFFLSEKIKLGFIVMAQQQQQQNVLGQMAPFGQVIKK

SEQ ID NO: 165475 - protein, 40 aa, Heterodera glycines
KKTQCGLWAIHKKTQCGRSTKILSVGDPHKNSVWAIHKKK

SEQ ID NO: 165476 - protein, 182 aa, Heterodera glycines
IAKICPEQHHLAMAIKLLQAGILILWSESAKNSGKLFGKWFTARTFIWPSVPTRPSQLSCAGSGMSALWGNTGDRMIGKKELKYSFICSICCLQPLTKAMDPTATDDEKRARWKQDYKCRSTGRLRCEFEDDTLDRWHEEMAKQRSRSASYSRARKEKAQLLPVAPVVKAKKYFCDKCPANF

SEQ ID NO: 165477 - protein, 215 aa, Heterodera glycines
  unsure (1)..(215): unsure at all Xaa locations
EKEHWQLFAITLQRASQSGFGIAISGGPKESAILVSDVIKSGPAFGLLQVGDRIISVNGYPLEHANYASAVAVMKDAQQLNMVVKRRVPVPFVEFEQRTLKFTLSKSRKKDDFGIVLGCRFFIKEILNPKLAEKEPGLKEGDTVLRINGQTLDGFTLDEAARLLQRSREKLSLVVQRDVPXGNGRXXSRWPSQTTXXERFGSVPAXTPRQSPTPV

SEQ ID NO: 165478 - protein, 74 aa, Heterodera glycines; identical to SEQ ID NO: 127125

SEQ ID NO: 165479 - protein, 218 aa, Heterodera glycines
WYFGIQKVTVNTGGGSLLESLTDQPSWATDKVDVTFDDVRGMDEAKAEVEEIVDYLRDPRRYTSLGARLPKGVLLVGPPGTGKTLLARAIAGEADCPFFHAVGSEFDEILVGQGAKRVRELFRLAKENQPCVVFIDEIDSAGSKRTNSAIHPHANQTINQLLAEMDGFEQNQGVIVIGATNRVDNLDKALLRPGRFDVQVTVSRADLPSRKDIFRLYL

SEQ ID NO: 165480 - protein, 72 aa, Heterodera glycines
GSRIGLVQRTPFLSGWAFAVKPGLGLGRLLQRLYSFIGTGWASDTRNLLTVCAILYRVYISLIIRYFISHQH

SEQ ID NO: 165481 - protein, 225 aa, Heterodera glycines
RLATDAPNVQVAIDQRLAEVLQGVVSLLAGISVAFYFGWNVAPIGLGTSIILVILQSFVSNYLKRRGMRDLQAAEEASKMATESLEYVRTVQALNGQGKAYRTFSEAMRKPHRMAITRGLWTSLSFALTSSFVSFNFGFTYCLGMLLIRAGHTTPFVLFQVVEALNMASFMIMAAAAYFPEYLRARFSAGLMFAMIRLKPRINSLSDKGIKTPIEGRLELKSVQF

SEQ ID NO: 165482 - protein, 166 aa, Heterodera glycines
FARERPEKVRDCFSAALPFRAHLSASHRHTLAELNKIAAHLSSGSNPLQKKKSLHLSFRGTKSTHFSNEREAQKKQPKTHKRRPQTTKERDALTKICHAQKLTQQLRRVQSDWESASMVLRRGDAVVVKALRQDGFSLCDNAVSSGLVPVALLGPFDERFTAPVSP

SEQ ID NO: 165483 - protein, 93 aa, Heterodera glycines
  unsure (1)..(93): unsure at all Xaa locations
ADCAAEKPNPKKTPFIYPKKIFKGAPVKFLTXEKRQDFLAGLHQKRQVLPLWVKFSINNGTVSPSPSPGHGPGLYLNHFACFMQGFVRRLKRF

SEQ ID NO: 165484 - protein, 83 aa, Heterodera glycines
KTKFRKNFRRFEWLVFQSPIVRILLEILNITVFMELSSRSNLFFQLSNLIGIISLFVGSYGSYIIVPIGASLLHEYRHVYFKN

SEQ ID NO: 165485 - protein, 164 aa, Heterodera glycines
MSSSSIFLSFASYSLIILALCRAQNESAAQGDAQPPPFLTEASQEKINEFYQYVTSLGHLKETETAEKVKEWVDKQSEEIQKKYVEFEQERERAKAEGEAAHEEAVRKFSEAAKKADKELTEIANNPNLSANDKAEMINRKVQSLPKKVRDEIGGAMGGGGGGQ

SEQ ID NO: 165486 - protein, 97 aa, Heterodera glycines
IIVNASADEFYKQPMFYFLAHFRLTKKKILIHSKIYVLVNLCRQIRRLFRQHFLTKKALNCQIIRWKIQFPTLLVIIKLIIFNNFDFIFNLVSFCFR

SEQ ID NO: 165487 - protein, 98 aa, Heterodera glycines
INTPINTAKQFFFFCFTTCRCLSPSAASSASRKESINIMCCIVKRKYYMSMYVCIMIVFCKPSLIVISRSLPFPSLISPLFSPSVLLLLLVPVCWLHS

SEQ ID NO: 165488 - protein, 41 aa, Heterodera glycines; identical to SEQ ID NO: 131599

SEQ ID NO: 165489 - protein, 192 aa, Heterodera glycines
MNSLLLSYLIICWVHLGRLDLVPQLIDCLLERPLGSSDEENAFLDIARSLHSTHQLVLAVEYMQKLRKERPEFNESTDFWFLIGCLHQALGQLGLARTAYETAISFQPGHIDARINLSTILQQLDQSELALETLKDLNYDSCSHIPDERLLCRQAEVLLEQRKADQYISCLRLLLIPHFYQIYRSDDACSVS

SEQ ID NO: 165490 - protein, 211 aa, Heterodera glycines
CFLGGSACLFYRWYAQEKSKTVYEIMGCNSWEFIVYTIIRLETLGEKPKSTQVFLYPGRTLKWNNISITPIGVTFPPAPVLNSDFVFDGSNMALTREPLAIDFNCKNRQEAIDFNCSLGVQACTDCIPDHSSGLVNCNCRSHNLEKLMESPERRLPLNIKNYQLRNTGRKVIALTGFSPVQLNLQIEGLQMALELHQSLCTILPLNISGCY

SEQ ID NO: 165491 - protein, 167 aa, Heterodera glycines
GKDIASKTLNIPSRGFYLYVKPTDRGRFVKLAEDAINGRKNRLFLSMQICNNINELLRNFEGLVPVSEDMNGTPYNVIIRSESIVTDRRQYYIDLPEGRRGSFLRITLLETHSAILNSVVLPLEGIGPLHHALDSILDDYGRRFLDEAPYLRHSLMIRTDAKRFFFD

SEQ ID NO: 165492 - protein, 177 aa, Heterodera glycines
YHKFCSFLVVMESADSKGGKDADLQKALCVSTMAVASAVFEHALPPPLLPLASTVVSNPNTSIYFLSSGGNADVRIRCNSVAEDSVISESGNETDTQMGKMREDDKMTEKMGGERKGKGEKKRRRRRRRNSAGQRQLAIHQQSLNSLFRHIQVFPLKQYRELRMDYLRIKKMRMGTL

SEQ ID NO: 165493 - protein, 138 aa, Heterodera glycines
WNKQPVKVLVGKNFEQVARDDTKNVLVEFYAPWCGHCKQLAPIWDKLGEKYKDHESIVIAKMDATGNEVEDVKIQSFPTIKYFPANSKKAIDYTGERTLEGFSKFLESGGKDGAGPSEEEKAAKEGEEGGDEEGHTEL

SEQ ID NO: 165494 - protein, 150 aa, Heterodera glycines
  unsure (1)..(150): unsure at all Xaa locations
IKYIKAAHPGLDVIAGNVVTGAQARRLIEAGADGLRVGMGSGSICTTHEVCAVGRGQATAVYHDARVANELGVPIIDDGGFHNSGHIAKGLVLDVNDXLCGSMFATTTDAPDKHFMIPEDLVMKNHGEGSLQAVSNGFETHYDFDTQSLK

SEQ ID NO: 165495 - protein, 147 aa, Heterodera glycines
SKGVARDQCRVNSVCARHGTDRWHSFTSFTHPLKGLPAWVSSRIIDSFATQQQKNGCEALSSSALLLYTQAFCKFVQLIDAHSELLAPLKQCQNGRSLPRSLHLCELPGAFVAALKHSLHPEQSNALQWFINGLNPHWQWTAPTLPR

SEQ ID NO: 165496 - protein, 96 aa, Heterodera glycines
MVSNWMNCLGLISRRPTPPPMPPSPPSGPFSTTISAPSSSSSLITSSSSSSSSSSSSESITCTVTAGASSCCCCCFCLYCLPSSWPPSVPWAPPFL

SEQ ID NO: 165497 - protein, 78 aa, Heterodera glycines
KNFYEVHENVVKREQLEIDEWLAKNSSTIRGKDAPSSSLGVDETGFPNKIIEHLGNIFDKPTAISNIAWPICFNGPEI

SEQ ID NO: 165498 - protein, 201 aa, Heterodera glycines
MDYVRTLTSMVDVCLTLEPGFSTLEDLAFLDLAGGAVHLLGTAYSSKDIEAIKEFSRSLIWFTYRKNWPAPIGGFDGPTSDRGWGCMIRVGQMVLAQALIKFHLGSDWRWANEMVDQRADNEQFQAYLRLLRMFQDKRTAQFSIHQIAQFGASEGKPIGEWLGPNSMAQVLKKIVVYDEWSNLVVHVAMDNVLISDHVHTM

SEQ ID NO: 165499 - protein, 226 aa, Heterodera glycines
AAAAAVENQQQMLQQQQQQLHHQQSQGNLMSGGVLLPPGAHPPHFSSGAFPPLSSAGQQLSFPMESATHQQQQVLPLHHSQQQQQQPAALIGMFQRQSREDEGQQQQHQSRQNQAGQMQQQINQQQVEQMGTAGSNTTANQQQQQSTPAPLSVSSVSSAALSPHLMVPFSCPSTSSPIDPSTPLQFISHHPQHQGVPPPPPYKCIRWPCRKDPLGPSLLMLLFLPL

SEQ ID NO: 165500 - protein, 100 aa, Heterodera glycines
QTAGRPLPSPLSFLHHFPFALIFSSFHPSITPRSLLRSILPVFPICPLDGHSRLTFSRDKRIIHNLTLNEPNFQILISFVALNFSIILQNFKNSLSFKKS

SEQ ID NO: 165501 - protein, 225 aa, Heterodera glycines
TLVDALATNLKKVSSSLVARQMLAKRKQHVGESLDEFAQEIRTLVSKAYPDTSLEMNFDALVLGDMEEDAKREHDERLKRFRSGIAKDFFRSNMTASIKEKILFMDEPQSFEEAITQAKRVQQMQGALAEDLWKQTQGTKAEVALAEINAVRTELNEMREEQKKQEDQRVNFVQRTDEMAPQRYGQQTQNAYIQRGNSNRGFRGRTRGFQSYRGSFNPPNSNQTP

SEQ ID NO: 165502 - protein, 87 aa, Heterodera glycines
TVLILGQFAGRCADDPWALCASCNLRVCASQGGRARSSFELQLGAGFKGFGCLKWRKKSNFVQLWLFVDGQWEKKAMELGKALFGDR

SEQ ID NO: 165503 - protein, 182 aa, Heterodera glycines
MASWAWTGGAQIWHSIAFIWVSSVVETLISLPFSYYHTFFIEQKHGFNNETVPFFFKDRAMKLGVSLALSSPVVALLVWIIRNGGPNFPIYAWLALSLIIFVMMFVYPEFIAPLFDKYSPLPDSELKRKIEALAERVGFPLAKLYVVEDSKRSSHQNAYMYGFWKQQRIRSFHPFMSKAMNE

SEQ ID NO: 165504 - protein, 173 aa, Heterodera glycines
RPFHRPSHRRQSARNSLFVRQTSPPSGRYRANAESTVGVRAVFGRCFGCLASLAGVSFAALFSPSCCCSSTLCTTHFLRIRSLAISSTNARNESKTSSRLSAKRTFMCHSLSSRQSFHFLLHSADLRLNLAQHQIAHHLNHCLVIARFSDFVPPFAAAGHKGTGGTQHARLKP

SEQ ID NO: 165505 - protein, 182 aa, Heterodera glycines
NLSRKCNRRSASHAPVPFALRPEVEKVIDNWVKDGVLEQVTTSEWATPLVIVPKAGNKIRLCCDYKVTVNQWLDIHQYPLPRPEELFSVLIGGEKFSKLDLKEAYLHLMLDDKAKECLTICPHKGLYQFTRMPYGVASAPAIFQQVMEDVLRGMDGVAVCLDDIVVSAPNAAEHLKRLEMTL

SEQ ID NO: 165506 - protein, 225 aa, Heterodera glycines
YILLVPLKEHGMDEQIWKKLASNVVEALNASRQNPFQVDQAFKIDDLFNKNIPMGGQAQQHLAIIDQSCNFQQWVRVLYFFICDKIGDPLLRTLFASLCCVKHDASILGRTMCKNIPHMIIQALVEQNDAILDKFEQEALAVFCAVVGGQICWANDAMVAICAIVDAMERFFVGRTAAAIVGTRPKDKDVLSERFDALISKILAQPNPDSLTVVPLSVLAAQKCN

SEQ ID NO: 165507 - protein, 198 aa, Heterodera glycines
MQLNTSNYHFFNGQPSPAGATQSNNKNFFSGQPNYSNNNSNWNSPKANGTQPKAASSSFATQSAIKKDNYQAHELVLNRPKAEVDKWMADNEVKLSGHSLTGPVTSFQESTFPAPIVAQLSSVFSAPTAIQAISWPVALAGKDLISIAKTGSGKTLGFTLPAIVHVLNNQRPQQQRRPGESPAVVVLLPTRELGQQVE

SEQ ID NO: 165508 - protein, 158 aa, Heterodera glycines
RRTSARLMCRPGCCGRASSSSGSTLVNAALDRMSLYSSSNTFSTNSSRFWACSAAFLLLLLTLFVLFTRSFLIVRVSVVCHQSWGLNKRALPIRFFPNAAFLNVCSSSAEEAPPLPRIFLPLDLLVAVIATAAALLPLRLVNMPPRPPPPPPPPPCPS

SEQ ID NO: 165509 - protein, 175 aa, Heterodera glycines
AIPVKDEKGRIVMKKVKVQRYMAGKIPEFAQDFDSDEDAQQAEEEVETDLRQFLEEKRERERREKDEHRHNRKDGKRHRERRDQQLDEFKKELKEEEALALGEVEEEDEQTREERHQRAMLRHRRTEREEAPLEQEDLEEEADEDERQRRRELLKRIPQRQEEEELLAKQPDAGE

SEQ ID NO: 165510 - protein, 51 aa, Heterodera glycines
KIIIKLCRPFLVNKAELVENCSSASHHINILYYKDNLNVYLKQFYNPRPHL

SEQ ID NO: 165511 - protein, 59 aa, Heterodera glycines; identical to SEQ ID NO: 129099

SEQ ID NO: 165512 - protein, 125 aa, Heterodera glycines
  unsure (1)..(125): unsure at all Xaa locations
IIYIYEYAFLCSICHFICIDFVNMHVLRMCLSSVYIYEDALLCIYHPXVYIYEYTFLCSICHFICIDFVNMHVLRMCLSYVYIYEXCTLMHMPTHKCIFINPYAYALLFIFFHLISYICALHFYA

SEQ ID NO: 165513 - protein, 89 aa, Heterodera glycines
LPTPPLFAAISNIFLNFQHYFHAIAISDLLPNSFALDYLKTKMSEYMNPSDNAQFNQINADLLLRYTGEKKRGILNFKNLKVCLIEPLF

SEQ ID NO: 165514 - protein, 157 aa, Heterodera glycines
ISRLVIPVVRIARASRGAPDIPNSENIDRDAVAGLVKSCTKISRPFLKFTHSLPPNSGACVAEGWCCHLAEKNTLALFIPSKLFSSTLSRENFVDLLEYCEEHLKVRRILACFNKSDINPCQGIPRALRCIGFTLLPPERYPAGIDKNTIFAMGYKI

SEQ ID NO: 165515 - protein, 191 aa, Heterodera glycines
QEFAAEKYGYTAVKHQREVGTGYFDYVGLAAAGGVSSTTALKDSTEEAQFYTATASADEDEIVKITAQEMPGDERILTPAALRFLRELHNKFEQRRQSLLAQRKILQHKLDEGDYFPDFDPNTEELRADRSWTSQAEIPVDLQDRRVEITGPTDRKMVINAMNSGARVFMADFEDANSPTWRNQIEGPIKL

SEQ ID NO: 165516 - protein, 107 aa, Heterodera glycines
MNKEQIKEIFQHIGIPFDEKEFEGTDKQMAFLSDQKIEDQQKKKRKKNRRKKNGQKLGMNEENESEQTQETTESKIEEKGKSEKERTKKEEEKEAMEEKMEEKEKEN

SEQ ID NO: 165517 - protein, 80 aa, Heterodera glycines
PTLARERLYSILHHTFVGIPYILKECLAAHKEADEMSTKCRSYVNHFELISLRDYHFSYRFTQACQDDIRAHCVQFGQDK

SEQ ID NO: 165518 - protein, 148 aa, Heterodera glycines
RQIGTNEAFDRPADAALLFEDIDDKDVTYAPEIQSLEVPPDQLSQADSLNLVDEEQFSEEHQRVIENLQRIIDRLRRTPSPRPHRMDQAQVPQAPQFLRSYFNDESTSSLSSTFQSIRQSSLLSALGVTSTQEMLLRLTSLGALSDAM

SEQ ID NO: 165519 - protein, 99 aa, Heterodera glycines
PAGQINLTVQKLVEVGTGIGNQARIGLLDLNPFCRDPDQTFFRINRDKDPGKIPKGSPIPFGLQISVTYDNPHKNLINHPLAELIGVKPRGHLLLLVDE

SEQ ID NO: 165520 - protein, 91 aa, Heterodera glycines
KICEKLQESLDKFGIDISKIHLVLRDAQSAMKLGTNILGCDSQDCFLHKMQLVSLCFLLVKNEKLSQSVMVLKFTRIFYRFLKKSKKSLGK

SEQ ID NO: 165521 - protein, 155 aa, Heterodera glycines
MPHKWHSPRSSPGPKFENNLRKCCLIIDYKHTAIGFLKIPKSISLGRFGGARMSFGRYERTGDAATRTPVGVGERARAKRRAGPTKPVAVAGAGTNLAVKKEYLRLFTQEMLLTFLRWLANRQTARRRRREREREGGGVSSKESCLGYGSCRESG

SEQ ID NO: 165522 - protein, 213 aa, Heterodera glycines
IFSMLKPRPLFRQFVQSRFSSPNSSVEPHKKITTVPISAKNSATILHEFVNSLKTVNLPPSAVPNASILDKIVPKPGQRMRITDRIRTFEQIVTEIDFLYTVSTEVPSALSDEHWVQLLDTVSAAEREHLLRTIHYAQLVEKAAAAERQTLKNGTKTLDAIAGVNDDDDDGCVAHSSSSATTATNSPNYQQMFGDEFCDQSALKSRMDTHFGL

SEQ ID NO: 165523 - protein, 70 aa, Heterodera glycines
NICITDVFSTDRFSGHEQSWYHMKNVKKSCFFTTFCRLENLFACAKTTWSLFYYIFFWKTLIILENFFYV

SEQ ID NO: 165524 - protein, 106 aa, Heterodera glycines
THIFQVCHHVHLFRFSQFHFQTSDSANWARKDFFAALLNTLKQDFIKREFRQRTVKKKKKRGKKKVKPSDFFCLQRLLIYTLTQRNARTMGQLPLVLAYYFRVSNT

SEQ ID NO: 165525 - protein, 173 aa, Heterodera glycines
EEKEQFTSARRTVEGVFRDIIRLDNEAKEFSFSAHNTMVEAQNIKNKNPDKPGVNFWHSKLLDGVLKIHALFDKIKKEEKNMKNIKKGMEKCLDRKDLTMCQELAEEAKQSIEIAKNYRQEIGHIYRTAYSQPDLGIGDLANKLKETMRKNQIRFERQRPQEEFRDEFIAYKI

SEQ ID NO: 165526 - protein, 98 aa, Heterodera glycines
WVFFPNYILFACFSLINHLFLMAPMCNDFAFSNRYCVALCLANQNDLSLSRLQNELLGGLTAGISGHPFNHNVRSALLCTGIYVLYSHGKVGQWPTSC

SEQ ID NO: 165527 - protein, 79 aa, Heterodera glycines
IVKNIRKLFSVLIMLYNAFKPRREAGQFQNFVPHFTVESPSTLLNNYVSMSIVAFGQLWNGKMGISDGVRSFLKIPLFV

SEQ ID NO: 165528 - protein, 133 aa, Heterodera glycines
LSFLCFATKKVLIKNLICLFLRLFNAYFAIFSAFLCAYFAKNIFFIEYLLKKIFYFYIFPQFVTIFQLVSSACILHSLKPSNRRHGHYTYYLEFANGTRIRQMADVIYDERQGGKFVICMSLGQYTFVWRSGL

SEQ ID NO: 165529 - protein, 114 aa, Heterodera glycines
FNQCFPLLFISMSLFDLPLTDRLIIIMPFFLQSFINGGNAIQCPPPHLKPSLYKWRLSLAIDRRFVLHSLREQNVAAEEHKYPFIRIIEWINNKRKYLGMGEYFLKNRSKFNNQ

SEQ ID NO: 165530 - protein, 196 aa, Heterodera glycines
IVARMSSDLCSPLISQQQQQQFVAQPLAHNVQQQVTNTELGANLLVNAIAAQQQQQNQMGPFLELLANLNTSNQSTASVHQPLPQFNSPLADSQSSSLIDGSAALNAFQLVQQTAQLNHQKMLVEQQQHQLISAATMSIKSPLSSQSAVFAGSEGGIPALFNRLSAVPSIFRSMGPSHSKPIPLLDEQMDLLQFKR

SEQ ID NO: 165531 - protein, 119 aa, Heterodera glycines
LDHVTDAANNIHSHNDDDSLLRAYIQEWENYSQLCRYLPLPFNFIEKNLVKTPSRPKTESQRVRNVMLDYFFRHVFADISQRILNAAMGMVERERNRELVNSQMIVGVRESFGDFQSQT

SEQ ID NO: 165532 - protein, 67 aa, Heterodera glycines
RQLFWNTCLSLWKTENKCALNSDVSADRSIFIQHHQRVVFFYHHQHYSSSGHRLIKFDAHCCGPVPY

SEQ ID NO: 165533 - protein, 31 aa, Heterodera glycines
FFFFFSFRGSDGNVRPLYSDQLHISANQPSK

SEQ ID NO: 165534 - protein, 144 aa, Heterodera glycines
EIRCQFQCRFGQIRCPIIINNRSNKTQSAGVYGALTCNGSPAGGVRVKLFDVDRWFESDDLLADGWTAQNGTFALYGSAKEATKIVPKVNIYHDCNDTKICQRKFSIFVPLHFVNEGKIPSQFYHLGTIELSEKFPHEQRDCLH

SEQ ID NO: 165535 - protein, 91 aa, Heterodera glycines
  unsure (1)..(91): unsure at all Xaa locations
KDAFQIEVPLILKHIQIHWRCTGDVQRDEEIDXLLEKHADSLRRKLSEMFFHTPIPPFVFVEDRRHLYEQELSKLLEIADYGMQYRAVSHV

SEQ ID NO: 165536 - protein, 67 aa, Heterodera glycines
KIFKSILRGCIFHFYCIFVNEFSGNPEKFVKNGEIGIKHKKSKIGKVRHYKSHRRHAKSSGKCVFRA

SEQ ID NO: 165537 - protein, 100 aa, Heterodera glycines
VNCIAICSSLCVGLGNGAGRTNRKRHFPPPMVPLLSVSLTALFPLSLDAFAHFVLVKKHLTSMAPIIPREQAQCLQNVFKHFAHFEINSATKDWTQEGGH

SEQ ID NO: 165538 - protein, 83 aa, Heterodera glycines
LLLVNIIAYELNPYNTLGIRRTAGPKDIKDAYKKLALQWHPDKNKNPESNQRFSDVKQAYEILSNPHRKKAYDTFGFPDDQFE

SEQ ID NO: 165539 - protein, 79 aa, Heterodera glycines
EFSISNIYEHCFVLFVLFSSHFFSCFFLCKTITNFIYSVINILQFLYLLYLFFTNNQFLLVFFCSFYIVKRNILPLIHV

SEQ ID NO: 165540 - protein, 82 aa, Heterodera glycines
LLLSSSISLLFHPHGPPYPQSELLQLHLRLQRTHRRAMRWARLNTFEAGAGFKSLKDWGGGAQLGRGKGNQLISLLINNGKW

SEQ ID NO: 165541 - protein, 89 aa, Heterodera glycines
GLAIAKASSPPVARIVLNADENWSTFQTQEEGKIDIFVVLLHEIGHALGLRHSGDEHSVMFPMFERSVGEHLPVISNDDVEHLRALYGD

SEQ ID NO: 165542 - protein, 103 aa, Heterodera glycines
IHLADENPVHIRHIRRASQPNGHREWSSPIFLTFHLFRWSNPQFVPHKPRQPVLVQLPSRIRLPFSVHSPPSISHPRVHRCGCCCCCQPSLPREIRVPIVPRM

SEQ ID NO: 165543 - protein, 209 aa, Heterodera glycines
YIRTCVHHAQEKGYRCAVLNHIGVLKNVQLTSQRIFSYGGNGEMEAMFRVLAKLYPRTYFIGIGFSMGANVLTNCLASGLDPSISSRILLGISVCQGYCASDASSLLFDWQGGRRLYNYIITESVKRLLRRNYAMVVLPHVKSGLVDERKIWSSTSLLWLDEFYSRRVHNFASVSDYYSHISCLPRIKDIKIPMIFINTLDDPLVPEAL

SEQ ID NO: 165544 - protein, 174 aa, Heterodera glycines
MDNEFSSLEEIFAQFFPGQQCSAAGSSNWRWDRNLAENLLLEKTVRFKEDGFCVQFHPLFSYGTAAVWGECALDELVRAYWEVAEDEMYGSSMMFGLGTRDALQSVPFGYVDLIGGVGQLGDQAYGLTHNGFVTHACESRPFCEQLRTMNDIHCTCTVGILFDGPSARIGFSLD

SEQ ID NO: 165545 - protein, 24 aa, Heterodera glycines
FFFFFFLLTSRSATTPIKRPRRVT

SEQ ID NO: 165546 - protein, 210 aa, Heterodera glycines
KCLPLELLYEIVPFIPAENAAPNALSSCSLLHKLLLPRVIKWKEKAMDERIIELFDQFKEEMEQKLMNKLDEIKEFLSLEFNQKFDALEQKFEQKFDALEVRVGRLERGTATNTNQGKKSLNVHERLDLIFEKLGIIRVNKSRSPEPSCSNTLPTSETANNTNTGGLENDGNRGGESEKEQTKSSNDGALPPPMPPLRSSLQGKPPPVPT

SEQ ID NO: 165547 - protein, 213 aa, Heterodera glycines
LSVGSVEQLESEDLEDIGVKKLGHIKRICLALKKLRNYRAELVDPPLAVCPLLCPPSSSSSVCPLSSVVGIPLDIHSSAFSSENLFVQSLSSKRRNSQAQQSNSQLTAVEINEKNCQRISFTNGISTDGTRLMSKWTEDGGQRVQMRNVSFERDSLDERTATDKGPPRLNLYRTSQIIAQLPRDPPPELDEADEWEDERGTNGLHGDGHHGQP

SEQ ID NO: 165548 - protein, 160 aa, Heterodera glycines
  unsure (1)..(160): unsure at all Xaa locations
XEXDXXSRRXXAXEKRPPXEXQXXXXXEGRXXKEEXPRFFFEXQXXSELEPKYSVLPASVFAKILQRVGQSTKLNLSGRPADRDVQLLSTSRLYHVGNKLVAFTPQFMDVRRSHLVYDIRVLMDEWSSELHYIYNSWKQVSIRGRPLVLLMISDNMLQTD

SEQ ID NO: 165549 - protein, 207 aa, Heterodera glycines
  unsure (1)..(207): unsure at all Xaa locations
MEEDNAGDIIKWLYKDSTKLDCSSEKVKVTSEHLHSKLCQVKLRGNLLGFKPLDFASEPFLIVCEKINVQRSEQNKNSLAIRQSNKELHLEFQSEKQCDQWVVKLMTCSHRIVQAEYDQVLYNRFTQPLPASSLSQQMVNNFAYFLTAPSVVNNXFSLSQSHNFPSRQIKCQEVMYESKLSMVVPREILRLSHKWATELRDELLDKL

SEQ ID NO: 165550 - protein, 119 aa, Heterodera glycines
TSAGGIFNASYLSSEKGDDNFVLNACATEEKKCFKELEKFCPPPLTIHKCQVCPESGCNENRTERICPSELETTAEPVDKNGQTKNGRGSPGKTVRHHHAKPCRNIVGTICREFGMDLS

SEQ ID NO: 165551 - protein, 192 aa, Heterodera glycines
VKKILFRIILMPPLDKIFSCRLKGIELNIFRGDIVMAETDAIAILCDPDFKLNAGVGRAIRNTGGQDFMNSLNEEKRKQRGSRVISVPISSGIRSASVLLAPVSGMDRHSLDQVYSAIIQKALDLRIESLSMPLLGSLFSSLDTASNYLWACLQQFSSFGRLKKIQIVDTNDFHMRSLHKFIIAKLRAQSQL

SEQ ID NO: 165552 - protein, 151 aa, Heterodera glycines
MLQSAAHSNGITNGNNSNGTKSGGKSGKANGIGTILTTTTSTTTTITTTTNGISAAAVCLQSPSTSSSGVFLHFGQLTAVLLLHHHSAVVRFKRGGRWNGAHFATTVRRRRPGAGHATARTWPTVGAATVAACGPGSAGSAIRHRWPCRRH

SEQ ID NO: 165553 - protein, 198 aa, Heterodera glycines
MANGSTDKFSKLPELAKPSLYQIFVSLNLNTFKFKGKQTIHLEITKPTNYLKLHSNALDVEKASLKLEDGTVFPDLKREIDAKWTLLTVQLPQEIKPQKAELEFVYNGELTTNMKGFYKSTYKDSEGNEMAVASTQFESTYARNAFPCWDEPTYKAQFDIKLEVDKALTALSNMNVTEEKHTETGTKTVTFARTPLMS

SEQ ID NO: 165554 - protein, 67 aa, Heterodera glycines
FFFFFFILYNRCYCVYLTDQSPPLLHPLVFHFDHQMDTFRFLSPSLSIHKRHTLSSALIVLLHINCE

SEQ ID NO: 165555 - protein, 51 aa, Heterodera glycines
ILSLKYFQKFSWRRRLPPLHKKFFFGKSAPQKSVLLIFKFGIKLKKMIFAL

SEQ ID NO: 165556 - protein, 206 aa, Heterodera glycines
MQIFVKTLTGKTITLEVEASDTIENVKAKIQDKEGIPPDQQRLIFAGKQLEDGRTLADYNIQKESTLHLVLCLRGGMHIFVKTLTGKTITLEVEASDTIENVKAKIQDKEGIPPDQQRLIFAGKQLEDGRTLADYNIQKESTLHLVLRLRGGMQIFVKTLTGKTITLEVEASDTIENVKAKIQDKEGIPPDQQRLIFAGKQLEDGR

SEQ ID NO: 165557 - protein, 168 aa, Heterodera glycines
  unsure (1)..(168): unsure at all Xaa locations
RDDIVHLLCTIFNLQTARIGTLIXQVLGEDFSFELKKALSGDFEELILALLEPAAVXHAQKMRRAMSGLRTHESVLIEILVTHRNRLIAEMNPGYDQLYGHPLENDICWDTTRAYERLLVSLCYDSRDECWSSDPLRADTTARALVQESEVDSGVNDFLFKQVLANED

SEQ ID NO: 165558 - protein, 84 aa, Heterodera glycines
YVCTFSNLDKMSEIWFFYKKSQTSETALCNLCHNSFSCKKSSTKGLWDHLKMKHNDEFEQLEKRKGKTNKEVINLESSIIFKII

SEQ ID NO: 165559 - protein, 211 aa, Heterodera glycines
  unsure (1)..(211): unsure at all Xaa locations
AGCAHIKSEYVVLRSETQQQEGGNKPPNESNPLEGNSHEGILPRNVRARGMDRQREQKMAKARAENRQKIVRICPSVLFESEGRKCKYGEKCDAEHSLTKYWAKKPPDIGXVLAPNAKHHLSLEGPSCFLFDQMGKCSFSLSCCFARAHTNESDLSQKSKAGHSEWQSVLNTHTLPIQQQLRKRTYDFSRSERALHESPSGCMEREAPKWD

SEQ ID NO: 165560 - protein, 131 aa, Heterodera glycines
MNGSTPRGQKLDSKLRRCIKVANAATVTTPLLAFPSGAEVVVGPTSIVEIPLGNSADGISQSDGARERPTKFIYAIPAALAAAAEEGKFQQILTANQMSINLMDGEMRSLISKLIEQQKQSNETVVKRQNI

SEQ ID NO: 165561 - protein, 112 aa, Heterodera glycines
HCFGWKSVRLRYSPEHYYSNRALYCQIFMRKKPQPSRPNTSSAQPCELAYYFLALFTLICPFFNFHLVPNYFRAPFSLIVSFGSLAVRIRCPPCTSPSYSPNRIQLKRQLIN

SEQ ID NO: 165562 - protein, 215 aa, Heterodera glycines
IQLATPSHFASKGQIDRVGLNRNKLFVALRNARELELWSVHCLVPCSWKCLFSYKFHELFYAHCALSSQQNAIFSMVAAFFNIDGNSAEDGGIKILRYDLTYEKLSEFDLDFDCVDTFEGVTLERVAMGCGQTENRLFLYDRTMVTGEIPFWQISLDWTKMTFSIKSVPILDGHHFCAHCIRFPVVLDGDRRIILRITEDFQVVVYEGKSERWEE

SEQ ID NO: 165563 - protein, 73 aa, Heterodera glycines
LFVKTWELFILEIAHYFLHRWASPGANTVLHSHHSADNARGHLRGGVGEPSPFIRMIRDLFISVHAYHSVIRQ

SEQ ID NO: 165564 - protein, 78 aa, Heterodera glycines; identical to SEQ ID NO: 140616

SEQ ID NO: 165565 - protein, 196 aa, Heterodera glycines
  unsure (1)..(196): unsure at all Xaa locations
HYEREREALKNLLEEFKDIFSKXQYDLGSFSGGEHHFDTTTEAPISSLPRRMPYKYRDELKKHIDQLLNKGVMVESETPWVTPFVVVQKKDDGIRPCLDFXKLNEVMIPDRYPLHRLESIMEKVGSCKFYSSLDLSSGYMQIRLSDDTSWKCGVITEDNVYQMRYMPFGLKNATAAFSRAMAVVLSGLEDCSLSNV

SEQ ID NO: 165566 - protein, 81 aa, Heterodera glycines
VKKGKKIYFQFFFLLKFLLGPKFIGFHINTLFQPKKLLKIFSAWFETSGIFYFLNFHSSPCVNIFKISPFIRHFHQKFSSS

SEQ ID NO: 165567 - protein, 55 aa, Heterodera glycines
IYTKLLFLIYFLSQKKRITTKSAKIKCHLNKNNNKLHYNFTLIIIFIRINFLVKL

SEQ ID NO: 165568 - protein, 59 aa, Heterodera glycines
AYVPEKQNSRHEAEILKHRQLLGAAPPPPSPKNENLISVFLILKLKNIYRFFIRKKFIL

SEQ ID NO: 165569 - protein, 218 aa, Heterodera glycines
  unsure (1)..(218): unsure at all Xaa locations
HNNPDLVMPPKPSDKEKAMAFYNIDFSLSNQLRLAGQSPGSSVDSLSPNKSQQKDYMQRKKDFIRRRRCQADQDRASKVISKXMSKMAQDAHEMNQSVEKENDANLRPVIGWKEKMEQHKPRLDYSDVFDAVAGADAGLWVWEIENFYPVLVDSGFHGQFYEADCYLVLKTTRETNGALTHAIYYWIGEKTSLDKAMCAAVHAVNLRNHLGASCRTIR

SEQ ID NO: 165570 - protein, 218 aa, Heterodera glycines
  unsure (1)..(218): unsure at all Xaa locations
SPTSSSNSTVLVALFKALPEELYSHKLKIGENRRTEIEEELARHTETLLSKLFXCALWILLCLKKMDFERRFLFFSPLAFSIKAVDCLASWLLNPRCPVAVLTRSPFFRSVLSVLSQPNTSQHLHDAATECAVNALQLIDDSKVALTMSGELSEFAQLLQQSIFETADVFRLAMREEDSEKLQNFTRLYAEQSNAFLSAMANNSPQGFGDLRMLDMLL

SEQ ID NO: 165571 - protein, 156 aa, Heterodera glycines
  unsure (1)..(156): unsure at all Xaa locations
SRAALGLCQLVLVPHNILLLKSTRDAWRLNLRDNELIVDXAHNLLQTLASIHAVELSTGQLNLCSALIHDYLERFRKRLFFFNLLHIRQLHSLTVAVHNLATSTAKEDDGGAKERVLTLTQFMAKLGSASDIDLVRLLDYLDQSKLCRKLRDFRLQ

SEQ ID NO: 165572 - protein, 111 aa, Heterodera glycines
EHSAASWPHNGRFAPVFNFIKNIRPFRGLINGRFAPVFNFVKNIRPLRGLKTVASRPFLILLRTFGRFAASGRALRASFLNLVGARRALHAFFSNFVGLGRALRDRFLNLF

SEQ ID NO: 165573 - protein, 149 aa, Heterodera glycines
MSFQTKSYSATIQLTDEQRERIKQNRERALRIQAEKAEQRIKQGPTAAASQLLPHVDGMAISNNKPPPLIGERLVCPRHIQIQPPITTKNSNSPRPSTSSVQKVLVQMDFSLINANRFKVQFTPFNSDVMDKLKSIPSRSFNADDKTWS

SEQ ID NO: 165574 - protein, 192 aa, Heterodera glycines
CGTVPTFPCHSRNAHFDPLRLSLCVNPNSSVQHWLSSRVDALSNKIRFFVRQLCARCFSIRSALSPVHFIRFGGRCWPFQQNNAQITRDCQLNLRANGCSSLAQLLKQNANSRILLFIVPVSFRTSDQFSAASDPKIVHVEFPDSTFIISTSIMYNSQPPAKALNNTVFSQRHNSHFYAFDLSSSTSCVEGL

SEQ ID NO: 165575 - protein, 105 aa, Heterodera glycines
TGDPTGRGTGGQSIWGGDFEDEFHPALRHDKAFRVSMANAGPNTNGSQFFITICPAEWLDGKNTIFGQVVEGFNVVQKINQVPVYKKSGRPREEISIISISLKSV

SEQ ID NO: 165576 - protein, 116 aa, Heterodera glycines
SSINVANSMSPILAFSNISLLVGNSLAKMLNFVSIMRFFKICLILITAPSFPFFTASNSFFAISKYFTSQNVSFFFINSMRLPNVCSISFLFSRTFDQPNTPQLQPPKCQIAFQTH

SEQ ID NO: 165577 - protein, 174 aa, Heterodera glycines
  unsure (1)..(174): unsure at all Xaa locations
LFALPAGALIGSYAFGALNGFEQIHAIGAFTSSLCCVGAISGLSSQHSARIGNSLGMIGVSGALLTTLGTLNPDPQTLSQMCAAIASGSLIGSIVATRIKVTDLPQLVALFHSFVGIAATTTCVSNYLAEFSHFLADPAXTAAVKTCLFLGAYIGGVTFTGSLMAYGKLQGYYF

SEQ ID NO: 165578 - protein, 85 aa, Heterodera glycines
NALLVRCFVGSCTCTCSYVTCLARLWGFGVLARTCGSNSRFTDRNSGAPMLCMLWRSAWITGIPALIFRPELRREHPLNLSISVS

SEQ ID NO: 165579 - protein, 196 aa, Heterodera glycines
  unsure (1)..(196): unsure at all Xaa locations
MHFLSVPWKLLFATIPPTDYWGGWACFTVSILMIGLLTAVIGDLASQFGCWVGLKDAVTAISFVALGTSVPDTFAIXLSAVQDKYADNSIGNVTGSNAVNVFLGIGIAWTLAAVYHWFQGSVFRVDPGTLAFSVTIFCIEAVICIIVIVARRHKAIGGELGGPRNFQMATSAFFACLWAFYIGISALESYCVIAGF

SEQ ID NO: 165580 - protein, 165 aa, Heterodera glycines
AAIVTFYGTLDNWDLILLHLYDILIAASLSKFIKSNCFSIFSNRRLSKGQNHRASTLHRTLRPIPMDRRRRKMPTLVRVPPLLPMPPAFVGTLNGAFGSQKSSVISFCAVYFLFILSICFRSSVSFGMSLTCITSKSSLILVILFFVYNVSTNFLHKNLLCDGSK

SEQ ID NO: 165581 - protein, 196 aa, Heterodera glycines
PSAPLTFRATSSLHSSCDRISPHAIQELLEFSRLSGRMRRTVIGQPANYFVSTNTFQASPDSRLSSRSPSPSCLSSGRTSPAMSGIVSRLKTTNFLPSTGGMRKLSSSPHLLGICEVGFLLTHSFNVKIASRRLKKAEICKTCWAKATAPSAPTHSSPAEPTAQVGVKTFSAMAKALPRSSFAVRGPPPWDWAPSG

SEQ ID NO: 165582 - protein, 175 aa, Heterodera glycines
YLNFAAQAPQFTRILSDQEAQIGGQVVLECSVTGIPQPTIEFHTVQDSFRILTGTRVSIQHDATHTQWRMVIKDVVESDFRQYRAVAKNSVGQAVSECTVRASEPGIERPRIVDGLNRQRVREHETAEMCVRVLGAGKPGQPPPDVQWFRNGESLQPDGRKLEVVEYREAGEYKL

SEQ ID NO: 165583 - protein, 71 aa, Heterodera glycines
AMVVQWLVRNTHCVKARVRFRCSLTFCFFQTVAFLSDPLSIFINIWSIFENSFPFLMIFLKFTVFKCFVSY

SEQ ID NO: 165584 - protein, 139 aa, Heterodera glycines
MLSPDQLPDEVRGMLKPFIISKERLVKISEDIETELRQGLQEGATTNGRTSIPMLPSYLPALPDGTETGKYVAIDLSGKNLRILMLTLQGKDKEPIIATNNFVVPYPIMKGSGEQLFNFIVNCLQKFLREFHLEEANLP

SEQ ID NO: 165585 - protein, 68 aa, Heterodera glycines
TKLRLFKLYNMDQQQKIKTKRNKVKLEHDGALYVFDQLSADGLKKFWRCEFHGPSDNLPQKILIIFSV

SEQ ID NO: 165586 - protein, 198 aa, Heterodera glycines
MRNFGLSSDQRPLIWSRTDRRFSHNSLDPNEDPVSGIERVSSTSTLFSRRRREERLREQEEVRRRQFSGSRKLSDGASEHTLSEKYESLDYELIENELYRAAEKDKGHQRKLFRQTVDRWIVCFLIGVATASVAAFIDVLVYYNSKLKFHLIINNLIHSCEEGSVGSSGCTWTILWVWALYNCALVAVASFLVIVVSP

SEQ ID NO: 165587 - protein, 52 aa, Heterodera glycines
RLLAPPYPPPPLPHKKALNKYTAKKSGVKNKIKISSIIGSESQKSAFLDKIY

SEQ ID NO: 165588 - protein, 201 aa, Heterodera glycines
MHNAIRRADPSGDYELLQRVGSGSYGEVFKARDVRSGEFAAIKIVKLETGDNFADIQQEILVLKECVHPNIISYYGSYLKRDRLWIVMEYCSGGSLQDIYEMIGPLAELQIAFICRETLHGLKYLHQRGKIHRDVKGANILLTHNGDVKLADFGIAAQITATIGKRKSFIGSPYWMAPEVANVERSGGYGSECDVWAVGIT

SEQ ID NO: 165589 - protein, 209 aa, Heterodera glycines
MTSPNSAFRHESPEDVVFDLFKLPNRDEASIGKLISVLRGFGLQPDDPRLRGTMDKMREAEGTHAEEHSDAWRHMIREQFKTCVHPCIALITRAIRNQLIIPNWTEFTGKVRELFEECHAETGGQVATYIPQLARADPEKWGMAICTIDGQQFSLGDSLAPFCFQSVSKAFNYAIVASDLGDYVHSFVGHEPSGRLFNEICLDPNGKPH

SEQ ID NO: 165590 - protein, 210 aa, Heterodera glycines
MSEAAISLKTKAMQEEAEKNEQNFEFVCENDGFRYYKDVKTGRQCCLDSAGFWYILNEEKGAFEPMASNFVAEKLAEKPRRKQDKMQSILKNVERFGIRFDQHGKPVFPKNEKGHFILPKDEKGSPFFPVDDRTVPIFPWDHEKGMPTFPVDDTDEPIFPRNDQNKPIVPVDENDQPIFPVDKTGTFIFPVDESNCPIPALTVYGTRVVP

SEQ ID NO: 165591 - protein, 84 aa, Heterodera glycines
TVADSEEGPTPFLCPLSFIISISSSSTSSHWNCCCCCSSVPPNELTVSVEFAAENVVRSKPRILRLRKADINWYAKYVTKTGLI

SEQ ID NO: 165592 - protein, 188 aa, Heterodera glycines
MDESYKNVHYGYWIRNLHLLQENAPIPRPVPCYCRLKVKPNYYGLEYHGPISRVETERLLLEFGEGAFLVRESHRCANAFTLSMNFENSVLNYKLFYDALCGNHYVGEKRFDSIFELVQDGLICMYVEKHASDYIDQMADSAEYELSPYSFYGSFVAGQNFVSQTHPRGHNWQIFTFKIPTYCDFCRN

SEQ ID NO: 165593 - protein, 76 aa, Heterodera glycines; identical to SEQ ID NO: 130912

SEQ ID NO: 165594 - protein, 126 aa, Heterodera glycines
RHFVPPTLSHQWRQKPFGFKHLRPKPKSNICGFAHNMNLRVLFIRSDAVFDLHGHLGAVDRWLLGAAVVVTPRPAAHAAMRRSEQRLLPLHLNVPAPSVDRWRELPPLLPVMRKYFVRLVANPALL

SEQ ID NO: 165595 - protein, 211 aa, Heterodera glycines
MEEVRRHGKDADRIWVIFHQGVYDVTEFIANHPGGDRILLAAGASIEPFWTVYPQHKTDEVMEILEEMRIGSLRLEDLQEIETQQKDAPSGDPFAADPPRHPALIVNMQKPFNAETPPSLLIDSFLTPKELFFVRNHMAVPRTNEETHKVRIDGIGVDKQIVLSLDQLRNNFEPVSIVSAIQCAGNRRSDMNEFKKVQGLMWTGTAISNAR

SEQ ID NO: 165596 - protein, 125 aa, Heterodera glycines
AIHPPPPPPARRHRCLGMMMKWKRNEPAFERPLEEWRERRNQHAQNTIHPPPAPPQEEEEEHWAQAWPEEEEVAKISNEEMDDEEGKLAPESELDYDELNRGDFYLIGGVHDPINLRFEAAICAR

SEQ ID NO: 165597 - protein, 110 aa, Heterodera glycines
LSRHFLFSLTILHLFAPLFVASALNFYFLVIIFVRTIIEDGSPKRAIAGNALHFFRVTMVALFEMILCHKLQDEFERGNQQISIETTYFMIMMPLWALLIALSVHACRLF

SEQ ID NO: 165598 - protein, 219 aa, Heterodera glycines
KYGISKKFSYDKYYIYPPWAVDKIQIESVGRMELKAFKINHTNANITEEEWANVRHFVRVVDKENGRLLSKDEQINVKIPNKPDGSLKFWVYLLYEGLRWHPFIGKTAMKMIFEGTNVLYFSSYNSIWHEKNFTLGNLKNCNITEQLGKSNITEFNIGIHVMDNAGKYNVTFDTGGKVTECQYENPEMPPWTVQYIAVILKNDPQQLIKPEISCIPQNR

SEQ ID NO: 165599 - protein, 213 aa, Heterodera glycines
VLSSVVIGEIQQQQSPDSFVPTSFGRRRHCWVCNDVWMDILPLFDHAQLGLKLALISPRFDVLVDAHFNGKSELTIWRQITIQRFKGPKAKLSEWIDDKWVAFPLPDRPLPNKIRFRNLRIENPDHSVLAFLRANQQIFEKATNLCLSVSSCFHDCLFSFVDNNVQPIWDVFACEIWPIFAPNIRRFNFRDGDHLDNLRRRISPTILTDLNNL

SEQ ID NO: 165600 - protein, 99 aa, Heterodera glycines
HALGIEPGTHPPFGDLLTDHFATHKSFMVQQLSFRTPCSLIRCVSSPFIVCLSLHFVPFRLRPFGVSPISSPLAPLAPAFVLNERPSAAAAEETLCICS

SEQ ID NO: 165601 - protein, 45 aa, Heterodera glycines
YAGGFMKRHFQLARSFKAIDPLPSPLFNNFIIFFIRTFQNFITPM

SEQ ID NO: 165602 - protein, 99 aa, Heterodera glycines
RDGRRTRPSDGRRTTTRPKRWEWRRRKTLFGSVPAFSLLPPSGTVLSRLLRLLCAPQAKQIQRNHSQNKWWKWAHGFRCLSAGFALRRQKFGTFSVGLS

SEQ ID NO: 165603 - protein, 129 aa, Heterodera glycines
LSLRPQPNSIPKKLFELVGFATFVQFVVVLVSNIAKLVKKATEKHSLAQSEGNRQQKSGKNGFSCKICSSQIAFGQMRRSVCLPCGHCLCSDCLLTLSSKDLSNDTSSVECPFCRIKCPSNRIVFPLNL

SEQ ID NO: 165604 - protein, 50 aa, Heterodera glycines
PELSDVLLRLHRLGRTSFRKLKDKRDYRRRRRFCSWLYLSRLAAAKEIPF

SEQ ID NO: 165605 - protein, 215 aa, Heterodera glycines
ERPQLSCCLLHQKLQMINFCISVKKRKHKEMEANETENLGGSAKDLPANRNTADDEFFDAIESFDQFDVAISSECPRGRSLPLDSNEFLKSNPNQRIFVPFTQEEGPMTEDQIEQRESFLCNLEDANLRTKAQSELLLSDMQAFKAANPGCELVDFLRWHSPRDLTEEGELSDRMKIAGNFWQETWDSARAIPATQQQRLFNETREVEQILQYFA

SEQ ID NO: 165606 - protein, 102 aa, Heterodera glycines
  unsure (1)..(102): unsure at all Xaa locations
EQVHPPPCIFFSGGQRGNNGPPGPPGAPGAPGQPGTGGGQPEPGEPGAPGPNGQPGQAGEPGAPGRPGQRENPRPTETAPAGPXGEAGAPGQPGSGWEPRER

SEQ ID NO: 165607 - protein, 194 aa, Heterodera glycines
MCFGRKEKKKRPNSPAYDKKPVHPSAAGVVVSPTPIAPSGPSSAVPPSLVPRTAPTSAAPSAPNKKADLGKAVVRPSRPPGSTKPLKSTATTPVGLPHPKKGVSAGIDVPSSPYSADPIDCAKTGKWKAVSRPPPPSSGKKTDAKTKAVSRPPPPPAKKTHKGKVVTPPHRPPPSDKKPFVKAKTLSPRFPSLF

SEQ ID NO: 165608 - protein, 212 aa, Heterodera glycines
PTGEELAQILLKEDCSNLQNKLVHGQWINVLYRRLNDQDVENSQSKINNKTNKWICPFCKRDNFSTPDLVNEHTRRGDCPVSPIGIRVKLDNGLTGLVPMKFFSSDQNKTFMDPTKFFKPGQSQYFRIINFNPERIQCDLSCRSEDLKGDEQQQKFDPYFDHVQMESVQKAKKIKKAQKDDENKNRRIFQYEYFANYTDEKAAAAIRRMKQG

SEQ ID NO: 165609 - protein, 212 aa, Heterodera glycines
MEESERIILCRERECARRGIAVPPLFVAAPMVRYSKLPFRRLVSLYGCDFSYTPMIYADCFIKSEKCRQVEFVPSPFDLPIVQFAAKRAEEFASAAQLVYGHCRGIDLNCGCPKSDVRSDGYGSKLLEDPQLVADIVRQCRASIADPDFTISIKIRIQYPMERTVDLCRKVERAGVSHIAVHARTVSQRSEPPDYAAVALLKQCLQVPIFAN

SEQ ID NO: 165610 - protein, 116 aa, Heterodera glycines
MHTVVPTTSDCATNVQKSSVIGPIGQPIAAPESVKGIGLTDGGGAATEATSARIKQFPTPPSRDLCCGSGCPNCVWIQFADEVMDYVKSLPLHDGVEKQQKKMVGDALNQNVEDKN

SEQ ID NO: 165611 - protein, 136 aa, Heterodera glycines
KIKKRARSARPEAAKRPNVPDKIKKRARSARPEAAKRPNVPHKIKKRARSARPEAAKRPNVPQKIKKRARSARPEAAKRPNVPQKIKKRARSARTEAAKRPNIPQKIKNGREAPVLRPRSGRISPKKLKTGAKRPS

SEQ ID NO: 165612 - protein, 132 aa, Heterodera glycines
  unsure (1)..(132): unsure at all Xaa locations
CLHPPNGPYGHFVHGFAHGGAGQSVHPVHADKPASPCLGQIMPCPLCEAGPSGRPEGQXPPCQQRDPGRPSTPARCGXDRDAIAGGPPRQAGHVGSLGSARPARHPASEGCVSRPTPGPIGPSGTPGRTGNA

SEQ ID NO: 165613 - protein, 214 aa, Heterodera glycines
MASIANSTKLTIGSFKTVPRMISPFVTRFGVGGFCAPNLAIANLTVRKSFASCAFPPAECEDVDYAFEMMSSTLRCGNGVTSEIGFDVQNLGSKNALIVTDKNVTKTRAFKEVAASFARLRLSFAVFDEVKCEPSQQSIQKAIDFARAKSYDCFVAVGGGSVIDTAKVAALYASNCESDFLDFVQKPIGKGMIPKHPMLPLIAIPTTAGTGSET

SEQ ID NO: 165614 - protein, 116 aa, Heterodera glycines
MNRKMSKMRVSRERKTSRTLSAHGFAKRVSPAAAVPSVGIGAVDLPTVISVGKAKAQSLIGLLLLGGPPNGGRKKEDGKCKTPRIDVAELTSQLPKECRCEFHRKARPPAEMLLIR

SEQ ID NO: 165615 - protein, 186 aa, Heterodera glycines
SCQSNAKDIWSEVSQLKGLPLIVSGNRTARQVYGGSGGYGSCQDCCSGGGPGPAGPPGQPGRPGNPGAPGSPGQPGHSVQTPCEQVHPPPCTPCPGGQPGNPGPPGPPGQSGAPGQPGSGGGAPQPGEPGPQGPPGQPGAPGQPGAPGQPGQPATSQEAGPAPPGPPGEAGAPGQPGQPGAPGQPG

SEQ ID NO: 165616 - protein, 162 aa, Heterodera glycines
  unsure (1)..(162): unsure at all Xaa locations
SVFTSDDEERLTKEVFEGDNSLNLPLHSDSQPITDRMTLQTELQITVDDDDQIMHTSVXHTLFWKDLQMAWSPDNYIGVEQLRVSPDKEQYNVDDRNYQLPYWSDVIINYLDNVVTVPPDVYKSTCINDEEYFSVDEKVCHFVFDSCTYHQNQPTMEFAHAD

SEQ ID NO: 165617 - protein, 134 aa, Heterodera glycines
TALSEELNDQEILLISTREALHCFYCQKSEVATPTEVLIRKDGTGITRRRFHNLLMLGRDEHLFEIEFALTATIGEKMIFGQNFDGCKSDIEQATSTLKLILEEDGLKNFGSMIDTTVFLFLRWKQTKKQLFGI

SEQ ID NO: 165618 - protein, 217 aa, Heterodera glycines
QNNRCVQTTDTSSTPWPMPPTDVTTPNPIRPVQSCYNEHECCSVWSQKGECQRNPGFMNSWCKASCQQCQPDYDLYQECDDRHPNCQSWTSQGQCQQNKFWMAENCRQSCGKCRVSRQQVCSGGRDSQQNQDRITLAPPKNRCTSPSCHNENICCQLWGLAGECHRNPTWMGCFCKVSCGRCIPQDYDFGGCSDYHQRCRLWAQQGECGRNAWMLEN

SEQ ID NO: 165619 - protein, 207 aa, Heterodera glycines
VPAPDMGTGEREMACIADTYAPTVGHTDKEASACVTGKPIVAGGIHGRVSTTGRGLWKGLAVFINDEKFMTKLGLTTGFKGNTFIVQRFSNVRLHSHRYLHIDGAIYIVVHQYDCAIYNPNGIHPKDLDDRKIANGSIRGYPGAKDLKPFTNFIFENCYILVPAACEKAILLWNAHRIQPNVIAETDNRPTTPDADAILMNRGDCLI

SEQ ID NO: 165620 - protein, 206 aa, Heterodera glycines
MKKIENATSVASKLTELWCEIFSRPPPENTNKLWEEYNKINSELQLLKLVRCDQFQRQSRLEQIPSFMNWCVEMGIRHSGLDILCSPHGLCLSATEPLEEGAIVAEVPLSAIFSTDVAENIVSLKHILQDKLLQSMENVALAICVAHEVLRGSESQWAAYFTTLPSTFPTPLFYSEEQLTALKPSPVFEESLRMHRAIARQFVYFY

SEQ ID NO: 165621 - protein, 41 aa, Heterodera glycines
FCRFQKCLKEGMVLEAVREDRMPGGRNGSAIYHMHKRRHRK

SEQ ID NO: 165622 - protein, 104 aa, Heterodera glycines
  unsure (1)..(104): unsure at all Xaa locations
KSALIVDGVARGLNEAAHTLDKRDAHFCVLAKSCDEASFEKLVRSLCKEHIIPILDAEDKPELFLFFGQGQYDQDGKARKTLGXSVAVVKNYRRDQEANNDLQE

SEQ ID NO: 165623 - protein, 212 aa, Heterodera glycines
FIPHSPLSYSTSYSPISPLKEQQQVKCADPSVADLGKTNVGFGPTNKSILKNPTTLFFKEQHKKFMKSNENLVDSVKKATETTAARKEALKTVAFGLTTRLEDTVLANKSVPSSSRLGKTVIFSHEAQSLHKIILAQQTEIAELRGKIEELTASDDRRRGEEREQKNTIAELASRLGMVERALTNISNTGQKCHEENRENGKPKAYKCTGAD

SEQ ID NO: 165624 - protein, 111 aa, Heterodera glycines
ATKSFKINLFYMEERRRRQNALLSKFRKRTKTDFSSSPTSSSMPANDGVLAESNVTKTDNDCGGSDEDIQIVETDEQRKTHDELRQKAAEALIREAKRSAQRAQLYGPQGW

SEQ ID NO: 165625 - protein, 219 aa, Heterodera glycines
AEMCVRQMQSEGLSFEEACGQIYMMDIDGLITTQRKNIEPRHLPFAKNLPDSQSLLEVVLSVRPGALIGASTVRGAFTDDVIRTMAEHNARPIIFALSNPTSKAECTAEDAYRVTNGTALFASGSPFKNVELGGKVYKPGQGNNAYIFPGIALGVILFKVSTIDNKLFLMAARMVAESVTEKSLADGRVFPRLKEIREISIRIAMRVAEECYRDGTAKL

SEQ ID NO: 165626 - protein, 76 aa, Heterodera glycines
  unsure (1)..(76): unsure at all Xaa locations
LLGIIFTLMTLPSWYSEMTPIEPPIAQTDLIPSAAASNLGRTDLIDLLMVLTPTSXPRDHPFDCLFRANPQLPPHC

SEQ ID NO: 165627 - protein, 213 aa, Heterodera glycines
ITYCQIYVPIRRFSTAYYAHFRHFCNVRTFAYFKLSLAYGDDREMLFVLAWRWQKYSLCFGQAPVPAGSAWDGRKAARRRWNPHVLVTQSLTERFNRDKDLTWLVNYLINTHRSLCSIYDFARTQMHSTKTAAQVHGTEAAFPAELMCHLSALDESTIRLSYGSRLAMEFLLLDDNRVAVRDCSVGSARSIGGGGPSLADFWHFWRQKCVMAC

SEQ ID NO: 165628 - protein, 103 aa, Heterodera glycines
RITVCICTNTSKSGSSDQNRLGMGTERRPSSFVLRMFNHLFLLLFVFSFLFVFVDIINLNRLIRLARYFGRIRSHFVLPPFVIPFSHWSLSCAQCKFVQPIHI

SEQ ID NO: 165629 - protein, 115 aa, Heterodera glycines
STTVVTTTIDTQMAYGGSHSSIMRYGIGIRWSSSASPFPPPSPPPPPPPSLVLSWLLITDNCGVGGGDDADNGGGIVIVSAVVDVTVIDGTVVVLLALLVVSVTTKCGADAAAFR

SEQ ID NO: 165630 - protein, 143 aa, Heterodera glycines
KDCKIGKLLIKTNKFTSEPELYYLRLPKNICKYKIFLMDAIVSSGAAAMMAIRILLDHDVLEEDIVLLSLLMAERGVHSLAYAFPRVQLLTISVDKQINEHYRTVLGVDDFDENCVGPDCEVVQLVASDDDPDEDGDDDSSSS

SEQ ID NO: 165631 - protein, 182 aa, Heterodera glycines
GSNPAFFQQLMQSFPGFNSPEIVEQIRNNMPQLTSLMTNPQMLQVMSNPRVVAALQQIQQASQVLRQEAPQLFTNFPGADIQAQPPTSAGATEAGPQPSAPPGQNIPSGFAELLGSLMNLSTTVNSSQPPEERFRAQLEQLTAMGFTDQQANIQALLASFGDLSGAIERLLGGGGQGNADTF

SEQ ID NO: 165632 - protein, 208 aa, Heterodera glycines
ENAAYCCFLVLLTRVIVSYRLTFLIPISLVTENMQRAVRRDAISTQKLHFRKTLAHCWHTPEGKPCPEGRPPAEPEPEPYDNNVAEMSIDEIVNGNTDFPGLVPLMLQFLNSADVDVDTRCTVSQYLSFIRKRARGEIWTTAKWMREFVHQHPTYKKDSHVPDECIYDMMKTMDKISRGEHCEKLLGCFKTKTEQRIPSAVKRAEEEM

SEQ ID NO: 165633 - protein, 192 aa, Heterodera glycines
RQLKIVKPNLSVVLLEKESRLASHQSGHNSGVLHAGIYYAPGSLKAKLCVSGIDLAYKYLEDNEIAHKKCGKLIVALDEAEIRRLEALFDRAKQNQCKSIEMIGEDGIRQIEPHCRGRKAIWSPYTGIVDWTMVTRKFAEDFQRMGGTVFCDWSLEGIGPSNDSAHPLRLIGAPNGAQIIDSKFLITCAGLF

SEQ ID NO: 165634 - protein, 94 aa, Heterodera glycines
MTSLGKRRSFRVAKKTNQPLWTKLKRYICNDVWMDTFPFFNNAQLGLKLALISPCLNALVDKHFNGQCLWKKKWGKATHNCAELLNFLRNVLYF

SEQ ID NO: 165635 - protein, 212 aa, Heterodera glycines
HPTKGCRCRCPKRETPSRRSKCHSSPKGSKSNGRCIRRANERTLRRNAPFSFDKQSFAHKRRNTFSNRPFLSTLELLASRQTIDKPSCTSNSNLALEVSKAGIADLNRPLSRMDIFYSGSTVTLTSRIRRREATITSTNAEAGGELTASAIDGAVAAPARSTLFLSSAGLADVATARTAGGGISSKWTWRIMKSIRPMLDLSLLQSPTFILL

SEQ ID NO: 165636 - protein, 200 aa, Heterodera glycines
MVLFALLPVQLMLVVAAVCLVIITQCCGGGQKKNTEEPQVPAEPEGAEASAKPTGQSAAPGGTSAAGGTSAAGQPAEASKKSLAPAGTGSTVPSAYAAPGTGTTLGATSQKAVAASGGGTSAVGTASQKSAVAPAGGASALGTASQKSAAGGTTSQKSAAAPAGGASALGTVSQKSAAGGTASQKSAAGGTVSQKSAAGG

SEQ ID NO: 165637 - protein, 210 aa, Heterodera glycines
MLPDAAKELYAGGTVNNVIDGLAFHWYSPPDCPYEVLSEFHEKYTGKFLLATEACTGAAERAEEKGPSMGNWTRALLYSHDIIEDMRDWAVGWVDWNICLDMKGGPNWVDNIVDAPIIISAKDDEFYKQPMFYAMAHFSRFITPNAVRIGSEFGGHLSSSSYNANNKPIEFVAFRSPDNKQLVMVLFSSVTQTTKVKIHDGKRTIPLTIP

SEQ ID NO: 165638 - protein, 192 aa, Heterodera glycines
  unsure (1)..(192): unsure at all Xaa locations
MPPKRDEVELFDESRMIRCGKHFLDAFSDESQITVLTGGGTTQIELIRSFDECELPEPIKRNIELKXYTQPTPIQKAVIPLIANTKRDIMGHAQTGTGKTAAFLLPIVCHVQKLVEARGSGVVNGTHPVALIVVPTKELAEQLYEEARAFAAGTSVSVCHTYGHMPMALSLREKSDGCDIFIGTCGRIQQLV

SEQ ID NO: 165639 - protein, 215 aa, Heterodera glycines
  unsure (1)..(215): unsure at all Xaa locations
MHRTSIYAKLQVKYSRRAKFTPRVARPWRQRVIAWAGPDAFSRDRFYELDSWYKARIQRPELLPKLHIIDPDLIVDNYXSKIQRRKERTLDIGFRKNEAAPAKVTEEAMQKLEELSAMNQLVIDLDSVDSSDQLSLAEHFNIFEDLFMPGIFFHNVQSVEVNFGGNNPQQKMLFGNTIRASTAAHPPTVTIGGPRTEAKAFTTMLLLNLEGLGQQ

SEQ ID NO: 165640 - protein, 216 aa, Heterodera glycines
HALVQSGSNVFLIRTEPILHEFFYQLVIFSFGNIGSYALKLTSSDCCDSAGRPLPIRELLALYLNDNEQRNENSESDDTEAQIKTSTKVLLEHKDLLWDFFSIQIVEYHSEEDKVPFQGHPKPMLSALPCILEGYLPQMASIPALINHLARNVDYSDEVLCYSSIARALSDFFTPFVVENNFDEEDTKVMEEHRRIQIVLRSIIFPTLKSRFLPPS

SEQ ID NO: 165641 - protein, 218 aa, Heterodera glycines
  unsure (1)..(218): unsure at all Xaa locations
RKDIFRLYLDKIVHGDINVTQLAKGTTGFTGADIENLVNQAALKAAKEGAKEVDMAHLDEARDRVLMGPERIKGRLPDEEENXYTAFHEAGHAIVAHFSDHSNPLHKVTIIPRGTSLGHTSQLPDKDRHQETKAQLLAQLDVTMGGRVAEELVFGQEHISTDATSDLRRATKVAERMVKLFGMSDRAGLRDFTVEPIESEQGFCVERGPSTSETIDRE

SEQ ID NO: 165642 - protein, 190 aa, Heterodera glycines
ALCLLALPVFSMSQLEYFVPSLPPAFTSHLLVFCYPVTLMAQTMSVWILVGITVDRFIAICYPFTVRIHCTVRRAQLTIVAILVFSVCYNLIRFWEYRINNSSDGDGTDAKNEQMPPVVGLLRENYLYMLLYQNVATMLSQFLVPLCVLCALNFQVARTILVAVEQRREMWAELSAAERREHKTAKMMLM

SEQ ID NO: 165643 - protein, 188 aa, Heterodera glycines
HPQYQRLIHAEIDAKCQEMNAKGIVEEISFKPADVNELRYMDRCIRESLRMFPAVPVVERQLQNDLAVNGKVWPRGALAVVAPILIHHNEQVYPNHWQFDPDNFLPEKVAKRNAFDYIPFSGGPRNCIGQKFAMLQLKIVLAHLFCNFRFSTEVPFLQNLPALEPILRPQNGLPLKITKRKCEIIMNE

SEQ ID NO: 165644 - protein, 205 aa, Heterodera glycines
ISGESLLVGWLGNWADYNGVQNFPTALTLPRVLKLAPSRNFLLTPPHPSVVQLREKELNMDDFRTFKITQLPKNGAVEIFFEIYYWRLRIYGSIVLEMQQTDKGEEGKISLVASKDGLEMILGWKNGTQHRYIERKARPTSLQIFIDVGSVEVFSDQGEWSCTARIPDEGRVDNIRLIGRSEVLNSQSAKMWSIKSVTQTDETTQ

SEQ ID NO: 165645 - protein, 93 aa, Heterodera glycines
SGNHPIITFIITQQLFVLIVDRLLQNGLHHLHIFALERVFVAGGGRRARRTARVSEAPGLTLQEDKEAPVLMLQEGEEARLHKRPGAHVRSQA

SEQ ID NO: 165646 - protein, 75 aa, Heterodera glycines
MLAIIFAVVTLSFFSSEMSHMNSKVREGLEALTIHINSACTDLMDVLRVVTPRSRPGDIPLNSVFSAPRQLPGHC

SEQ ID NO: 165647 - protein, 70 aa, Heterodera glycines
ALTFSAELLLRSLAEKDGVVVSWGAAIFAAFGVVVFVCPFVDIGFLGSVSSNFLLDGFTLRPLDVTVSGA

SEQ ID NO: 165648 - protein, 177 aa, Heterodera glycines
MFSYDKEKWTLEEKIRLLELFIDKDSGLWEDRANALQEEFSGKRPTDFFTQTTVKRELNNIFNKPNPEHHIFGMPTHPRGKEAAELWLKHFRRELEEGRERRRQMFMVAMRKQLDIIRRYQQGKLPKEELDALLEEARQRDAQRPDKEQYEEKIKQHMAKAYFEDVKNVHLLTLFQL

SEQ ID NO: 165649 - protein, 103 aa, Heterodera glycines
MLFEHWPMPSVRVPKPFEHWPMPSVRVPKPFEHWPVPASVPSVHSPKPFEHWPVPSVQRLMPFEVPPVHAHVPSVHWPIPSVIGQCAVFLPFDTRPSRSSSSS

SEQ ID NO: 165650 - protein, 152 aa, Heterodera glycines
QLFRIIRDKILTSRPITVAEYMQNSAASQLGYYAGQNEIFGERGDFVTSADVTHIFREFTGSWDVHDLEMTSWNDRRLLGELGPGSGELMADVHNVLRQFDVLQHVEVCLDESSERLVERQRQTLEKKLGEDLLRTIRWYDSLDDVPQGFSL

SEQ ID NO: 165651 - protein, 93 aa, Heterodera glycines
RILSILQEAQTDCTDTECSTSTGGDPTGTAGSNVLLIAMAWGLFAMLMFFMRPASMRSGGNDRENGQIAGKPSSAANGHNNDDGNGPPPGDVF

SEQ ID NO: 165652 - protein, 197 aa, Heterodera glycines
VDYDLLGEVKTHELKENGTEIAVTEANKNEYIELLVEWRFNRGIEQQTVAFFNGFTSVFPLQWLQYFDERELELLLCGMQEIDVDDWQRHTAYRHYAVQSKQVIWFWQFVRSLDQEKRSKLLQFVTGTCRVPVGGFSELIGSNGPQLFCIERVGKENWLPRSHTCFNRLDLPPYRSYEQLAEKLTVAIEMTEGFGNE

SEQ ID NO: 165653 - protein, 195 aa, Heterodera glycines
SHHQRHKRSYSSTRHVLINFGFQFPHDFKLGSGRYSKVNKGFYREPNRYFAIKITDLEAVSDTFKHNFVPHELKVWRELSHPNHLRLYKDFMNNDFLFEIINLAVGGDMINYLRNHGPVKEAVCSGWMLQLVDALSYLHQKRIVHRDLKLENILIFDRDVIKITDYGFCKQCCDDELSSTFCGTKSYKAPDILQS

SEQ ID NO: 165654 - protein, 212 aa, Heterodera glycines
HVDGEHSETGKSSASSDNELQRKEPSPPSTSKSSIAGIPNDFPKLPKFPLSALPAEIRRQQPMVMRQAPEIPKFASKPEVPDGGLGLAGESERPNSVSETSLNTVSNSADVSEYGGLSDDSPAPGGLIGTVLDLFGFNKDGKPTPDAGGIGRAVGNLLGGSNSPLPGKQFINNVLYKTLTSGSVLPSSASANASADPLNATSALGLPFPQSV

SEQ ID NO: 165655 - protein, 183 aa, Heterodera glycines
FSVFCINLMVFLLLLLYIFPLYFLVPFGAAHCHDTLSYYEDFDPRMSDFCWLPPGHDDCVEASCLFETAGKSWTKVSKGCTFNGTRECAELEQKCLTDGGKLLVDCSVCNSTSYCNDKIPNEIVVCLNGTMNDGEKKDEAFTEIRCEDAQCFSVRCIGTDNSTLFHTKGCVNMDKLWDVKLPL

SEQ ID NO: 165656 - protein, 208 aa, Heterodera glycines
MYSTVIDPFSKSDPEIGIRNQFKLYKNKSYDWRSNVIDPHNNSRFCFLQPLTTYTPWIFETTDQNFHYQRSKIYEQREKLDGLRPLDEWMVSTLPSRPGLYILFGLFSEEQQLRWLGRSLFEYPEPPNITNLSSNGTYSGSSVFKTCGAEKLRWTTLGLDYDWTSKDYSMEEKALPMEIKQISKLVIDVLGSFPLVPDAAIVNYYPKN

SEQ ID NO: 165657 - protein, 206 aa, Heterodera glycines
MVVSIHAIEGEQFCAVVCTNSHIFVLKCAKNGSQSVELAFQVDLTFPNAVNNQQKLGKDNECNQSILSSDVSADHKLLAVATTTKHVLLFELQSLGNAIGGTWEETKCQTIPKTPTAIHFSACGDTLLVGTRSGSLLQFRVNDANFCPGGAIELLSHFSMLLDHCLSPGRPNFLLSADRDEKVRVSRYPNTQIIECFCLGHTSFVN

SEQ ID NO: 165658 - protein, 201 aa, Heterodera glycines
GALARRMLNIQRIYHTGVMHSKFIVADGRHFYLGSANMDWRSLSQKMELGVMVRDCPCLAQDLLSIFDIYWRASDAKTATEMHAQVKKLAPAKFNPQRPLKLMDGEQRLAVHLAASPQAMNCPGRAWDLTGIIDAIKGARKRIFVHVMDYFPMFLYSQNRRYWPEIDNALREAILRGVNVRIIAAALHFPKTGLRFLKSLE

SEQ ID NO: 165659 - protein, 153 aa, Heterodera glycines
GKYCKTHTKQKKSEREEERKPAGRNTLEHGQKGGTKVKKRKAAGGGRGARLINRRPIPANAATNPHCWAHSGTRSRLLSLAWHHHPAPLGQQRQHSPLASSHYPPLLLLESRYYRRQQRSHTQSAVPFAEHGKASFGTRFGTCPPPTSAQFCQ

SEQ ID NO: 165660 - protein, 135 aa, Heterodera glycines
RFHNYSSPPNNEWHNNFKEKFLRAITSVSYKIYFNANADSFEPFELVNERTQEKLRLVLANQTIWGSNEWIMKRCPIGETAAAIHWEDENLDDNLNNVDFCRYAGFRCIGPLSPPQAAEDEEAGQSSEEASSDNE

SEQ ID NO: 165661 - protein, 208 aa, Heterodera glycines
  unsure (1)..(208): unsure at all Xaa locations
QYSVSTADITAKIGQLHHLGPSEFAQPAKEVRHLLADVEELLEQMELSAREIPSSSSERSKYETRVKSYRNDKRXLDAELRKAIERAKSNAERDELFQCGDGSVSGDQMDKLITNTERLERTSRKIEDAYRVTVETEQIGAEVLENLGQQRETLTRARGRMREADADLSRSNRMLSQMIRRVIQNRLILLVVAVVMMFSLLFLLYKAL

SEQ ID NO: 165662 - protein, 134 aa, Heterodera glycines
MAAPSIRLITTSKAPPATGHSQAVLLNNQTLYISGQTGIAAGSTNVVPGGARAEAKQAMTNIGEILTYAGSSFKHVINCNIMVADMSDFQAVNETIKNFFTEDTYPARSFFQVVKLPKSAYVMIDVVAIVQGQS

SEQ ID NO: 165663 - protein, 114 aa, Heterodera glycines
SLQLNATSTPVRAKLVYTFRRDNSSLHHERHERLHGIRPRRACTVVRRRGSLSIVRSRERLHGSLARVRAASAGEVPGSERLHVRRCNNDRRMDGRNLKSERPVRRCKDKEDVS

SEQ ID NO: 165664 - protein, 208 aa, Heterodera glycines
MQETHIVLGIASVCSLLAIIATVVTLPSLYSEMSQMNSKVRDGVEAFRVNTDSAWTDLMDVQVVVTPPSKPRDNPFNSIFRAKRQLPGHCQCAGLQQPSCPPGPPGPSGPPGQPGQPGGAGQPGQPGQPGQPAPPCPPQNIPCPRCPAGPPGRPGGQGPPGQQGAPGQPGTPAQGGGPGTPGAPGPQGQPGQPGAPGQPGKDSGYCPC

SEQ ID NO: 165665 - protein, 208 aa, Heterodera glycines
FVPSPPQRFLGASLGGGVQPPSKPSIGHQSQVKNSRGKPPPPPTPPTVIQQQKEQSPPVPTAASSVASPQQRQSVLTAASSVASPPPPPPPPPPPPLFQSKPTLSDNSVPSTSTESKASFVDPTNNKRSDLLQQIQQGTKLKKVGPPSTERTPVPTNAPTLRDNMMEQIKQGTTLKHVDASDVEINRRSVGGGVQEIGGLAGALAKAL

SEQ ID NO: 165666 - protein, 94 aa, Heterodera glycines
LAVLRLGAIYMHVNPTYTKRETQHFVNDAKPKVMVSLNASEDASFTQAGFDVKHEALKQEPSCEVEPAQKDDVACIMYTSGTTGRPKGAMVTHG

SEQ ID NO: 165667 - protein, 126 aa, Heterodera glycines
NGGPTDDGSEQSHSAAEDGEQLQLKPQSGRAEGAVGEETVRPSAGIVPRANRLNAKSQRKRLIVMMSVDQVDIDMRDRCSAGQKVLASILIRVALADVFEGNCRILALDEPTTNLDEDKVGRRNWH

SEQ ID NO: 165668 - protein, 168 aa, Heterodera glycines
MRKFAYFKLCQAVLTSVFLWQILSTHQFCGEFDEPTAFFNSAVSSSSAGGHCDQQFTLIGMDSTTGEYGAVPDKQKWHMQLMASSGGGQGQPIDEQQQQQKNQMEEFSSKLPTVGRHCIPIAFSLVNPWLHDNKSHLQKVVDLFAIQLLCGVLSLFGIAIHVLDQPRS

SEQ ID NO: 165669 - protein, 158 aa, Heterodera glycines
MIIEGENFKKTNDEKDRKKKWWQFPSGCKLFAELFFRASMVAVCFAFAYAVPTLDDLVPLVGSTSGMLLAFVYPALIDLFTFVPHYRAEGHRQKACFRLLLNLFLASVGLFGMVAGLYASVSNLISHGSNECNAMTTTGTPTIMWNLYNGTTLSSSIQ

SEQ ID NO: 165670 - protein, 158 aa, Heterodera glycines
  unsure (1)..(158): unsure at all Xaa locations
KLLITALRDQHPDVPIHVHTHDTSGAGVASMIECARAGADPIDAAIDSMNGMTSQPSMGAIWGFVGTGTGLSPGWENDPVFPNTTLYWGTGPYIFPNPSKCPRNNKKGGNSECEKNTXPRGGKFKKFHFPGFFLGGGEKNFQGGKKIIPAGNFSLKKN

SEQ ID NO: 165671 - protein, 195 aa, Heterodera glycines
ELAALLLHRRSLLGQQQFMRSSSSSVVVALPRVVLRLQRHEQPRRLGLGLVGTLRVQFVGMKQRQEGVQPVVHRFALFARRLRTVRQSLRFVSGVVVIRRLLHSLLLQRCAVANVSETEQFGLALPFLNEVLGVLLQVLLDDGDQILLLFSIGAADVGRLNQWSSIVFAVRQQTHVNAAREWLLLQVHFGNVFSQ

SEQ ID NO: 165672 - protein, 90 aa, Heterodera glycines
VRGIASVCSLLVIIATVVPLSSLYSEMNQMNSQLRDRLEAFLVHTDSVWTDLMDVQVVVTPPSKPRDNPFHSIFRARRPLPGHCQCAGLQ

SEQ ID NO: 165673 - protein, 202 aa, Heterodera glycines
MLIREYRIVMPFAIEEYQIGQLFSVTEASRQETGGGEGVQMVRNEPFEGQSLFNGRFTSGQFTHKIIHLDTKVPALLRAIMPRGSTTLHERSWNAFPYCKTEVTNPDYMKDNFLIRIETMHLSDRGTTKNALGLSKDELNERKVVRIDIANDNEFLKAADILDNTRPSTFRSVNTGRGPLEQQWQNNCEPVMCAYKVVTVNF

SEQ ID NO: 165674 - protein, 199 aa, Heterodera glycines
LSSVVFIYFAALLTIYLRFPELRPEERAHFRYPQTIDDAKRLGRVLIHYKDQHFYTVLSGVAAIYLILQSFAIPGSIFLTILSGYLFSFPLALALVCLCSAAGATVCYFLSQMFGRSLVMYYFPEKLSKWQIEVQKQADNLFNYIVFLRVTPILPNWFINLASPIVDVPILPFFFGTLAGVAPPSFLFIQAGTTLQMMS

SEQ ID NO: 165675 - protein, 167 aa, Heterodera glycines
  unsure (1)..(167): unsure at all Xaa locations
ASHSLAIGFGAVHQKRDLQSKFXAXGDELAGELMHPFTTQLEMFSQKLEDFGMKHRDQILKNSQFRRYFPEMCVTDEVDPLASSTGFWAEKLGVGTFYYELAVPIIEVCMSTTHFDXGLITIYXLRNLLMLSRKRTLIVPIAHDDVIRAVKKLTVLGHGFELIALGA

SEQ ID NO: 165676 - protein, 61 aa, Heterodera glycines
MHAFCVFQAHLDVHLKREEEEQKLQQEKTSKKETKKAKKKELEEDVIEDEYDDYDEQLHRY

SEQ ID NO: 165677 - protein, 112 aa, Heterodera glycines
FLASICFSRPISAVFSAIAASVATATISPTESISSEPPLAFLSSETMPICADALSLASALAFINPRSVNDIDVSFLITFSSFVLSSSACSRCSSSRSFNSSNLPVSSMIFLS

SEQ ID NO: 165678 - protein, 82 aa, Heterodera glycines
DTIIQSVQLGSYMGIGSVECILLLLPLRRLSSASSPIHRSFVVSFHRVLLRPFTGISVVLLAVVAVDNRDVHLQRTVRIRVA

SEQ ID NO: 165679 - protein, 177 aa, Heterodera glycines
AQAAKCADDGFKQVENGCKLECAHWLDAYAPTPAAGKQRDAHPLTNCFGRNVKMEAMPMNECMRKRVDNYCTSSATARISVPAPDYAGWMEPAIASNDTAFEQRHKSAFLHKARAAFFAFRNFQKCMNNCAKKRSIKCFGDEGCAISLPSDRALAKLFYNQCTQQQNVPKNARDACY

SEQ ID NO: 165680 - protein, 206 aa, Heterodera glycines
IKMCFSPQIDDTRTNCKFVFQQPCRCSIKQLEAIKFSKVVSGRNKSVGCNPTFCCFCCGIFGLVMFVLLLVLFCVAQFSAPNSPDIGISISFVSMILIVVVIVLCCMCGAEFGHSSLEVLYKCPTCGKETHRNYECFIDVSYNWGRRHGDTEMFRYRTFAGSLWGQYTKNVTKTILQKRMTMNNFEVVEHKYDVMSIVQDNYFKTT

SEQ ID NO: 165681 - protein, 116 aa, Heterodera glycines
HIDAVKAYGMSGEVSYDVEALALGEAHRSLFRNSLEFGDIKENTCIMVEFRDPQFPMHFIFKANRLDGIKELPRVLKPNDWDQRRHGSFQPQIGFSRDIPRANLSMAGHRTLKHHI

SEQ ID NO: 165682 - protein, 147 aa, Heterodera glycines
MDQIQQMAPKTPKFNSVRSSGGRLATMSPAARSLLGDKLGIRLGTDRIKVSPSPRGSASRTVFSPAIYQMIKVKNEPKSGATTPKRAAATPTSSSSSVTDDLLRIPSPGPSTLIKNKEQREAQQRKVSETEETQQNMVKRPSAADFF

SEQ ID NO: 165683 - protein, 120 aa, Heterodera glycines
MTHNATTDDQMLSLYDILPFDNPDGGVWKQGWPITYDPEKIRTEKRLEVDSHNDPGRGGQFVDGESLPSSARALRPLLLPSVFFRRGDNRFSFIGRPPFVTSSPLSAHFTRWTNGRPQRV

SEQ ID NO: 165684 - protein, 212 aa, Heterodera glycines
MAMTFMLGKDNGIGIVGVSSANAGTSLPIANNAIATSASESASCSSVTPSPSPSPIVAFNATNDALNSSSPFVTLRKQPQCQQSTPPTQPISSRESEAERKAKSRLKRSTRRSTQGVTLEQLGEVNMRNHSPKHHGRAEIGKEQKQRMAIGHDGNCELQMPASPCSSTSSSSAYLTAASHRAVDQHNSKVERVKENYNSTKNEATPSPSSTA

SEQ ID NO: 165685 - protein, 201 aa, Heterodera glycines
  unsure (1)..(201): unsure at all Xaa locations
IASEWSRFSIRVDIVTLPSLYSEMSLMNSXLRDGIXDFRVNTYSTCTDWMDVQVVLTAPSMPRDNPFNFILRAGTLFFXHWQCAGLQKLSCNPGLNGPLXSPGQSGDSAGTGRARNPXLPGKPVPPCPPQKMTGARCLVGPLSRPVXQGAPGKQGGPVVAGILAQGGGLSKSGSIGNLGQPVLSGFRGAAGQILMSGANGI

SEQ ID NO: 165686 - protein, 185 aa, Heterodera glycines
FGRLMMSKELYERKMRKIEAQKEEKVPEKFFAKVHYYFKRYWYIALPVHFAVCSVWFGALYFAVKSGMDVVALLERMHMPDHWVDKIRNVPPSAGFAVAALILYKIATPLRYACTLVGIRIAFNTLRRLGKLRTTREIDLTVRQRLDLLIEHRDQKRSAKRAVRHQNNSMKRHSLCSSRTRTKLD

SEQ ID NO: 165687 - protein, 168 aa, Heterodera glycines
PLLDVILLLDLLGFTLILPLIPSLIDHFSKRHTIKSDPIFAVFDSVAHGLKTFLNVPSIEPNNGVFFGGILGSLFSFLQCLSSPIFGSLTDLHGRKSLLLVAVIGSLISYCLWTLSSESFSIFFVSRLIGGLSHASVSVAIAIVTDVMPTEERGKGMALIGGSFSLAF

SEQ ID NO: 165688 - protein, 118 aa, Heterodera glycines
AINRSRPFVAIHGPPGTGKTKVIAEIVLQHVKKGKNVLVCAPSHNAVDNAMEACKMNGLDNFVRLGEEADDGALSEYRIGKLAQNHAEYERIEKDIRNSREIKSQRDFLDKSRLCNSI

SEQ ID NO: 165689 - protein, 175 aa, Heterodera glycines
KVEVYAPGLDGNKKYYVHVETRIGIHGKPERCVNPDKEGCGGIGSCVHCDICQTIGGFRQFIQIFKGDKPAECSAKGLPPGTYDNLSLKVCLPSKDELLPFLDQNSSRAEQLWDVFVSSRARSGGEIPLVIAARIFDRPINKLSIKELNDALHNTKKGMIGCHWIYATVRSINQD

SEQ ID NO: 165690 - protein, 207 aa, Heterodera glycines
  unsure (1)..(207): unsure at all Xaa locations
MADFEGRVKAYRFVAYTTVSFSIISLLSVCLTLPMLKSYVSNVGMKMDSELSSCQHNAKDIWSEVSQLKGMPLLVAGNRTARSAYGSCQECCSGGAQGQPGQPGQPGRPGNPGAPGSPGQPGQTPQTPCEQVXPASPPPTEPAPAGPPGEAGAPGQPGQPGAPGQPGAAGQPGPKGPPGGPGQPGNGGAPGQPGQPGQPGNPGERGI

SEQ ID NO: 165691 - protein, 133 aa, Heterodera glycines
KWYYPYHYPPFASYLELIADFQPYFNMPTKPFKPLEQLMGVFPAASRAHIPDRRRWLMTDSSSPIIDFYPETFEIDLNGKKYAWQGVALLPFVEEKRLLDALDSVYTTLTTDESTRNDTGPDRLFVCNKHKLF

SEQ ID NO: 165692 - protein, 150 aa, Heterodera glycines
MSSNKDEFDKSQERMKDAVNQVAEELDLSYIRKMQCEMHLCSAGCYEGRGALNRKQIDDCEEQCRIKYQAVVAKVDDEFSAWQDQLNRCISTCQDKQHQQFGTDFSKLSEQQRKQFSDNLAKCAGVCMDEHVKHLPKLKDRIVTFLKKSS

SEQ ID NO: 165693 - protein, 106 aa, Heterodera glycines
VTLEGRTRLPQRVQELVIDIGNAMTSIQQTSGSTDLLITSIRNFTSSDGIMANSEQNLVKIQNQMDRIETQTNGAEQNLKNVSSVNNFLDALEQSAYCTNFDDKKN

SEQ ID NO: 165694 - protein, 191 aa, Heterodera glycines
DNLYTYATRPSCTATNGCGSPYLFCDLTKQQTPEPLCCAKIKSGGDCSIFQGNNEEPCFDSVCINGICTASEKGTTTEHGETTPQTETSSTTLGTTQLGETTATPTTGTSSTNIDTTLIGETTSTASDHFSTVFSLSPSLLTTEPTDQITLSTISSSTTLGTFTPNTTVSSSYTQNPSCCCVCKECDEEEQ

SEQ ID NO: 165695 - protein, 94 aa, Heterodera glycines
HKADLKGVVPTQRFAVVADRKFDSEEFVPEQQFVVADGKPLRKGFVQEERFVSVGDMTQHLKVFAPRQRFGVVDDRKQCSGSRFPGLELKQAIG

SEQ ID NO: 165696 - protein, 214 aa, Heterodera glycines
VSLGLVDGRNVWLSPLRQCHANALRVVQKLAPGRVLVSSSCSLLHVPYSTKFAQSLTKKPVKGMLTGPMTILKWSFVRNDQPQKDTLFQVALALRDDVAELEKEGINCIQMDEPAFREGLPLDLAQHNEYLKITVQAFKISTGCVADSTQIYSHMCYSDFGDIFTHIAELDADVLCIECSRSDLSLLSCFDRFGYPLMVGPGIYDIHSPRVPSV

SEQ ID NO: 165697 - protein, 166 aa, Heterodera glycines
  unsure (1)..(166): unsure at all Xaa locations
HCVKVNNLCTKYCGCLDCDNRFPGCRCAPGNCRTKQCHCYYPRWECDPDVCKSCNCDKLDGSGXPICKKVSIQRGLQKRLIVAPSQVAGWGCFVNQDIEKNDFVSEYCDEVISTEESERHDTIYHRVKCPYMFGLNDEQVVDSTRVDNVIQFPNHSQNPNCRAEVI

SEQ ID NO: 165698 - protein, 112 aa, Heterodera glycines
IPALAFARKWENKLDLSQSNKLMCFRNLHLIRIAMVRIGRLKRELENAQQSGDDQLLFRCCDALMDRMPDQLQLDSDECTVAFDLDKFDEGAVQTLEQLLLIDPLTPLNGNS

SEQ ID NO: 165699 - protein, 178 aa, Heterodera glycines
MARCPFLFILLIPLLLLVLINFPPILAWILKRDDVLLAYSPNELTTDETKIIGEKQLCPAREWSLEKTFGLPIDPNSEFGKMLPGLSTEFNHALPGIGKSLEYILCTFDKMHCRQRFCQLNILACVRSVTCTRESDGRCMPCCMDHFQYTCVNDWKEVEAMFPTTTTTTTTTTTTLAP

SEQ ID NO: 165700 - protein, 150 aa, Heterodera glycines
SVQFHSKDCGTAATEWKPCIERRLADQVFGSCCERFVPPECRGLCTYESHPIEARILLMHTIQPSRCRMYKYLSAIVHCAAQTHDNTHCCREMGMEEIGQNCLDLCRPQQNPRIRWGRQSLRKDLVQCLSKWDQVMFCHQGGLWSRKISK

SEQ ID NO: 165701 - protein, 209 aa, Heterodera glycines
TNQTSVQTNPPTISLFVPTNNTVEALPASLPTASQSPILTQDINGTTFSRIPKPLETRKSPEQLRKEVQKELPKDTKVPLELTPEFKQQKAEERRKDAEAAQLENDWKGKIAELDRARQALGEEARAAAQGQSNDALFQGLQADYQRKLAEMTEAKQRKEQAQRDAAEQARKMEMLQKEWKKKMDELDAERRRQEEEHKQTHWHSRKRR

SEQ ID NO: 165702 - protein, 110 aa, Heterodera glycines
VKTLWIVRHAEREDNLHSNWPKDAKPPKLKSDNRPLSARGMQHATELADRFSNVHIDHSFASPFERTVQTATFLISPRKIPIQVEPGLAQALYLCESPAGFEESDELHTR

SEQ ID NO: 165703 - protein, 188 aa, Heterodera glycines
FLIMESSYLARQILDRCNNLLANRSRYTSKEEFARTVLQTLFGDPSVDLLLLKPHFDSLHADALNRLNALIGFESTVFMTIYVNDALFDEFIELFSRHCIRSPATVKEATESVYMWLLADYLQYLLPVDEQKLNLLKNSTWISAPFSSLPTSAVTSPRRLLRPEVLAQCAPLEHVSLRSGAFKTLYPR

SEQ ID NO: 165704 - protein, 92 aa, Heterodera glycines
  unsure (1)..(92): unsure at all Xaa locations
KHTLIALWIASARSLLAIIHTVVSLPCLYTEIRRMNNRATDXMDAFPINTHSGWTDLMDMRAGLTPPTNPIDNPSNSILRDKHRLDGDCECA

SEQ ID NO: 165705 - protein, 73 aa, Heterodera glycines
LYPPFLLLFSTIFSLFPILSYIAHKWPNNSIFSINLPFFSSILLQIIYINFCFHFIHSFFHPHHLCRIHLLIS

SEQ ID NO: 165706 - protein, 186 aa, Heterodera glycines
MSSSPSVSVLAIVAIVCLMCQCCFSAPHPCCPGSQKVVSLMSNYVGTFANSISKSSLCSDAQNVADALKGQLIGCSNGGDRTLLADIEASLASHSADECAHSLGFVRAMFAIAASASSHASNNSEWQALSTQFVQKVTEIDSKCAEFGISIGKVPIDGPKGDHSQRNVPSTDSVISMPGLTGSHQH

SEQ ID NO: 165707 - protein, 119 aa, Heterodera glycines
FLFKVDLIRQLKTDIELLNAPTTSPGSALLTPNASTRTRESAAQGTAKRTQNNAQQQQLQIPNAKNSPSFFVFPSPAAQTKNFQKTQREGRKSSSVSAAENGQMDERRSLLDGSMEFTV

SEQ ID NO: 165708 - protein, 97 aa, Heterodera glycines
  unsure (1)..(97): unsure at all Xaa locations
EHFFQLENELGLENVGICLVVFADNSNNTWRVQAIPVSDVSSFDNRIXILWRGHRDDQLEKESGIEGAIFVHANGFIGGTKSLEGAMRMAEETLKMN

SEQ ID NO: 165709 - protein, 100 aa, Heterodera glycines
LTQLNSELTFVSEQKEVLENAMKIGFDVPNLCRDVYRRFKDKHNFGQNVAREALRKAAEELILAWKWLAFCETETVWDAIIEANFLLRKFFCEFFLTEII

SEQ ID NO: 165710 - protein, 210 aa, Heterodera glycines
MRKKRSGVHTPNSICEKEQKKPKIGNESAEVCHFQAEKFVGEYCTVHTRPSLTVKALSFNSSIGRLCVIRQNESTVSQQFPSQLSLVEFYNADNLPLIFLEKSIPVNDRFETLVWVDNWAVFGGLGGRLTALSPFTSKFGRVQLCVSDILVMTRAGENHQFVAGNTSGELLVVNNRDFDEEGKCTNKVPTFSTVQTIKLSTDEHITAIGC

SEQ ID NO: 165711 - protein, 215 aa, Heterodera glycines
DDLLTPTEADGSFSFKNIPSTEMTKSFLERDNFESELGATQQDDPFGEDFCDISSNEIIDVFADGDLAGRPVIVFYAHRLPSNKNFDHYKFLRFIQFTLDKIVDSDYTIIYFHYGLRSNNKPPLKWLIQAYQLLDRRYKKNLKALYLVHPSRFIRFLWAVFQPLISFKFEQKMHYVNSLNELNSIISIVTLNLPEPIIRYDRSLHSATSNTVFDH

SEQ ID NO: 165712 - protein, 148 aa, Heterodera glycines
  unsure (1)..(148): unsure at all Xaa locations
TLLVLGIASLCSLLAMILTCIFLWSVYSEMSFMNNLVRHRLEAFRVYTDYGWNDLLDLXVVVTTASTLRDNPFNSIFSAICSLSGHCWCAQAXQPTCPPGPPGALGLPAQTGQLVGIRLPGEPAETGQPAPPWAHLNIPCTTCPAETP

SEQ ID NO: 165713 - protein, 81 aa, Heterodera glycines
MPSVALSWAKVNLPLLVRRSLPSACAMSTLATTILSAFGSCGCCSSSTDCCWGGAACCGCCLACGGGGGGGIFQTFLALSN

SEQ ID NO: 165714 - protein, 126 aa, Heterodera glycines
PTLLLPPPPPLPGPGAGAAHRQTSCQCSAPGAQLSTRAPRRRGRPRPPSSSSSSSSPPRRPALRARRGRCSSSTPSSSTSSSSSSSSWAGGGAPPNKLAMLSARRAAFHSRPCSASLSCSSSLSAM

SEQ ID NO: 165715 - protein, 186 aa, Heterodera glycines
MEKKIVYFKLVQIVLTLAFIWQLLSLHQFCGTFADPKAFIHDISVGHCKRFTLIGKESKSGEFGAVFDQDKWQNQLSMSSTNGRPIEEQQHQFMDELAAKLPSAGRHCIPITISLFDWIGKDRNLLNNGTLLFFSLLLWAAFWSLLPLGIATIIVLHSVEGFPVYVCAFGSIYFWCVSAAVSPICC

SEQ ID NO: 165716 - protein, 207 aa, Heterodera glycines
TLIAEAGFARCLSALKKQRMDASKLLPKPSKKASDLVKDSKKFLNSIGSALYASKVVSYAQGFMLMAEASREFDWNLNYGAIALMWRGGCIIRSRFLDRIQNAFEKNPSLVNLLLDDFFMKAIGDAHDSWREVISTAVQLGIPMPAFSSALAFFDGYRTEALPANLIQAQRDYFGAHTYELLAQAGVAVHTNWTGRGGKVTSNAYSG

SEQ ID NO: 165717 - protein, 94 aa, Heterodera glycines
CVGRLKQVRATAGALKGDVSNGPKAQEHRGRLSLKYPTEHGSATDWNDMEKGRQDIFFFQHQRAKPSEQPVSLTEARLNTRTPREKRGETIYET

SEQ ID NO: 165718 - protein, 121 aa, Heterodera glycines
MTSSETSAEKIGTEKGQQQTEFSREEEVTADGRNIRPVLCPHCPSVILRPLSANFLSSADGPRIALPLPRQKKRADEGGDEAVQTTEHSQWWTLTDMMQFENVGFTNAFRGRRFLACADCE

SEQ ID NO: 165719 - protein, 205 aa, Heterodera glycines
ERQALTRQKILTIIRENGLAQGLLQVLLLSLSAHITQQLGMAPGGEFRAAHAASKLVPGCGVILGDRPLNVTLQRALSALNIFQRMKFFFHLTVSLGMEIDEAEVERCKNMDMLEEMLQQMAGEFPQVSRILVDERDQYMTQVLHSLLQRSTMEKLYASKKCNAPFEPANVVAVVGMGHVAGIRANWTKHIDSTSLLTVPRPSMK

SEQ ID NO: 165720 - protein, 117 aa, Heterodera glycines
VAGLYAFERLRWNNGAKEERLKTQFRQHLEQRLHQTESIHTSSCEQQVTRELDQVYEGLKTVVGGFHREMKEGIDQCKCQKDSLEGIVKSINTIKNKTNFVGSTLDEFSRRFLNAFF

SEQ ID NO: 165721 - protein, 209 aa, Heterodera glycines
TINSMLYHMHRIGFFVIKIGPDTPAVGRLMRLTCESGDEDVFLDDHGVEDENGTVIFRKRSRMSRRRTKRQEEEEEDLVQTMIDTGICIRSLLPAAADEYPDEKVDLTMSTMRAPSVSIYKNSTIILEHIAKLEFYGHTNKKKLGTFKATSVAQIDVKTEGDLIKANLTLPTLVLTDIGTDIKSGMTQDGLDSLTGLVKDKVPESANKK

SEQ ID NO: 165722 - protein, 48 aa, Heterodera glycines
  unsure (1)..(48): unsure at all Xaa locations
IDNGSGVVKAGFAGEQSPKCVFGNFVGRPKHVRVMAGALEGDXFIGPK

SEQ ID NO: 165723 - protein, 164 aa, Heterodera glycines
  unsure (1)..(164): unsure at all Xaa locations
SLYSEMSQMNSTVRDGVEAFRVNTDSAWTDLMDVQVVVTPRXKPRDNPFTHLSCQSHCPDLPVRLASTAKCPPGPPGPXAPGNPEKPVREENPRKPGKLGKPVFFSPPKNSPXPFPGCPPGRPPRKGGPPKKRGAPVKNCYPPLKGGGXGKPLGGPGPPGKTWR

SEQ ID NO: 165724 - protein, 188 aa, Heterodera glycines
  unsure (1)..(188): unsure at all Xaa locations
INKWFCVLGLSVLPFFLFRWPFSLSLGQILLLLLTDCPLNLHLAVLQLRSHLRQMSQNLLLAFCVAFQIQRTILGSPAIERLWRLRSADVAAGADERRRRHXAHPPPNSAATPAAVAWSASGDCAAAAARCCRLGTARHDGRATAVPKNAAGEPRKRRHWHGVMGRPKIAVGRAERRRIRCLRSSNCC

SEQ ID NO: 165725 - protein, 106 aa, Heterodera glycines
  unsure (1)..(106): unsure at all Xaa locations
DGVKVVPVNADSAXTDLLDLMMDVTPPPKTHGDSFNSTLHTKRHLNGHWHCTGLPTPRCLPRMPGPTESTGXPRLPGRPGQPGPCGLXAHQHLSCPLRNRPCPACP

SEQ ID NO: 165726 - protein, 157 aa, Heterodera glycines
AGQTPLASQCHPPQIPRRNSFQLITIRNIVEGLRNASEPISTSQEKLSRYPCEDEAKTLLCCALPPALPSPSLRPLPSHFQLFSQPSPDQLPTTISDLSRTTTPQIVEPKNEEEAKESDQQKQKGTGNSRESEGTEKKQSIGGLMGDNGQTTQKTKH

SEQ ID NO: 165727 - protein, 73 aa, Heterodera glycines
IERRRGGTFPIKLRFSPFLMKLHHAYKIYHFHFISRDVSRDTPHSKVVGGFSCCKSACMLLFYFLCLIPGCLC

SEQ ID NO: 165728 - protein, 146 aa, Heterodera glycines
RIGFRIASVCSLVVIIFTDLDQPSLDSEISQMNRQLRDGFDVFRGNTDSGSTNLTYVELVLTPPSKPPDNPDNSFVRGKRTMPETGHCAGRLPPSRPSGSPGPSRPTRQLGRPGCARQPEKTVLAGQTSPPCRSHSLACSRCPSAP

SEQ ID NO: 165729 - protein, 201 aa, Heterodera glycines
LSLVDPPFYSLLCSLLMFPPLPYYIARRCSSASSSSSSSPIALFSAASPPTLRPPALANARPPHHHQQQRLAEKAGTTVLLLHGGEPRTNFYARAHLGRVLVDRLAVPNWVGMLIADFYFACSAFPARCIADSVHFPQNVDQLNWLRLRLERALALLLPEFGPFRCLPATGQAEDQTNVGRQLHSAIRHGMDNLLLFPLQP

SEQ ID NO: 165730 - protein, 181 aa, Heterodera glycines
MTLISKCSLLLLFVAPFSHAFFSGFEVSPNAARLRRQCGCGGCPPPPSGGGSVQLGISCDSPRPPPPPPCCGCQSSCGCGGGGGGGCGGGCGGGAIKLTIGCDSPRPPPPPPCCGCGCGCGCGGCPPPPSGGGSVQLGISCDSPPPPPSCGCQPSGGCGCNRRKRMAFLRRAVAQRSVGRH

SEQ ID NO: 165731 - protein, 211 aa, Heterodera glycines
QTEPEEKPKTFAFGLQTDQTGLIDSEMQTVSEEKPKTVTFAMQTVQTDLVNSEMQTLSEEKPKMTNDEVLELNVSKLPMDDSSFLSNQGRSSPLLDESLRRKYNEKCEEMAELRHAYEFQQSIISNQLDEIARLKQQQQLRNGVQKNGSPSSTRHPTITAAASPSSVFPSGALPTISGRPRAARRTYCEHCEMFDAHDSSECPKEEAKRAE

SEQ ID NO: 165732 - protein, 72 aa, Heterodera glycines
YCGFWNGKKETIWGGSDRISKLCCFILLAVPTRFVPFVMLQNPFSIQYQKAFSVGLIKLILFFISFGRINTD

SEQ ID NO: 165733 - protein, 193 aa, Heterodera glycines
MEDYCFDATAAAAAEQSRRQSGAASDLVQGDGLSSGFLDAIITKVNRSPPHRFTDEISDDEIRQLCKAATDVFRMQPTLVRIHPPAVIVGDIHGQFADLKKIFSTHGLPPEQQYVFLGDYVDRGPQSLETIILLFCYKVKYPSNFMLLRGNHECANINRVYGFYEEIDRRYPRTGARRLFDLFNQVFAWMPFV

SEQ ID NO: 165734 - protein, 211 aa, Heterodera glycines
  unsure (1)..(211): unsure at all Xaa locations
KVIILLISQYFCYSFYVLRVLVSARPNIKFGFHFSLCFPFCHLLANVPCILCSNFSAHWRALRQWVDRKTGRPNFEFLKSKFGTESVPILIGTDICPTQMPFSSFIDEYFGFSPTDNETKNKVAYLKDWHFQNSHPEESDLYELPAFLRFDWANYERWTVTDQQQNPFGGDYRFGYFGTKGSWTPFHSDVLNXFSWSANVCGRKVWYLLRP

SEQ ID NO: 165735 - protein, 170 aa, Heterodera glycines
MPTSTTTPLLPRSSCSTYRIAPNRYSDEEIPESPETSPDEEFGSMLKPDDWVGGAGSGATATRRMKTGQKLISWVDRIAHTKYFREASELKLIRKMMEEISSMRLLLNVQVTMLEGRMCCNFPPPPSDRLWYAFRTSPRMSVKAVPQVGDRSVELSLVSEWIENKLQLIL

SEQ ID NO: 165736 - protein, 213 aa, Heterodera glycines
LLIIIGVVQIIINVFIVIIFPIIVGIVIRIMTVIGLKGEHIRQLIRTVADLLAQHLKHAFVLPPLRVDHPAFPCAVFFGCILQVDMFTPFEEIARVQGEILICENATTQLQQNANLCLCAAFGKRCENVVHKLGDHFSKMVQKTLVFARTKFEENFDVNGFNLGARNEQRMEQIVPIHRFCIGSAKAIVEMTEQTTEPNCEFLHPIGCARTNW

SEQ ID NO: 165737 - protein, 161 aa, Heterodera glycines; identical to SEQ ID NO: 140016

SEQ ID NO: 165738 - protein, 210 aa, Heterodera glycines
DRRTTAEEGTEKAATNSSSSKSFKSRKPPPSASIRVVCATFVNHWRSRVGGAGLLLLLLQFLWVPPYLCFANYLERCLLPLRVYCYNAPDLLAVRTPLRVGPAACATHFFANNAAHWAQRHSKQRFPSPNSTCSLNGTLPVLLRPWRAIADNESSIQRIIVIRSAPRASEYRKYIRDSWKPAVERLNGPVVFVSGRDGTELAEENGQHGD

SEQ ID NO: 165739 - protein, 153 aa, Heterodera glycines
  unsure (1)..(153): unsure at all Xaa locations
VLGIASECSLLDIISTCIALPYLYSEMTPMNKKVRDRFEAFRVNTDSLCTDLMDVQLVLTPSSNPPDNPFKSIFHAKHQLTGQCQCTGSHNSEDVPLALPGPNRPSGQSGESGGGRQPGQAAQPEQPAPPXPAQNIPCPRMPCXGPPGRPGGQ

SEQ ID NO: 165740 - protein, 89 aa, Heterodera glycines
FRSLSISKCSPSVSSLSFCCWPSFAFPSSSAVSSALVPLPLKPLGAASSAKSPPIAREVPFTADFPPSAEHTDLADRKRRIWIRILLDY

SEQ ID NO: 165741 - protein, 139 aa, Heterodera glycines
  unsure (1)..(139): unsure at all Xaa locations
SSPSDHFHHNWFDYPFWRDLYWRWAEPIFEDGIHVXTNITNDSNRFAVEMETYQFRPEELQVKTMDDTLLIEGRHKNVRDRYNYTKMYFVRKNEMPANVETHSISSHIHSSGRLSVEAHKRWQAMECKRSIPINSGSRR

SEQ ID NO: 165742 - protein, 165 aa, Heterodera glycines
KMLCCEHDGVRPDIVTLGKALSGGLYPISAVLADDEVMLTIRPGQHGSTYGGNPLACQIAIEALKVIEDEKLCENAEKMGTILMDELQKLPKQKVKSARGKGLLCAIELDNGIDAWQMCLRLMDNGVLAKQTHEHTIRFAPPLVINEKDTRTVAKIIGRTLNAFD

SEQ ID NO: 165743 - protein, 73 aa, Heterodera glycines
  unsure (1)..(73): unsure at all Xaa locations
QETHVVLGIASVCSLLAIITTDITLPSLNSEMSHMNTTETDRLEAFRVNTHSLXTDLMDVQMVMTPPSNPRDN

SEQ ID NO: 165744 - protein, 207 aa, Heterodera glycines
MSSEILWSTVFLLLVDCATILFWFFFGHVKKRRRPHKNEIFICGDCWLLVFDFLAPSQLGLEIALVNRRFNCIVDEHFKTRKWKLGCMRICHKIGENGTKQLQIVNSDAKPLPIPQNPLPNKVLGFRHIQIHYIDQNVIAFLRRFHRRIFDVCSMVLYIHTDNDRILDYFLLNIWPMFRHSMRLMNLNSISLRRLRQLAGPSLLSDC

SEQ ID NO: 165745 - protein, 18 aa, Heterodera glycines
QQPPPYSNCPGPQLLISP

SEQ ID NO: 165746 - protein, 201 aa, Heterodera glycines
MPRPLPPHLLALRFFLCFCCSANFLQLLLQLVLAPHFVSAFSASQRDCQVNELFIECGTCEGSCREPIITNCRKECKPPRCECRAKLGYVRAHDGACVPFSECATYKGTSLAKEGTRPLTGGVNANKEQKEMHSQLRNEGKEAVALPPSIRPPSASLHHSTKQHKLQDQVIQVGPSPPVIVRPSGQSHPVGTSHMNLFADL

SEQ ID NO: 165747 - protein, 137 aa, Heterodera glycines
MLPLLSLDEEDNDEAEEEEAVKESTRGPTPTVLSTIRSIWMSRSSAHGKVSLFVSSLPFSLFGSNEASFRESSSFSSDCCCFCCSVCVAVSPFSEGGNGHPKLKHLVNAWRSRSKVSNSNSRQQLGPASKVYASRVP

SEQ ID NO: 165748 - protein, 148 aa, Heterodera glycines
FLRKPTVAHVQQQRHFQQHRTKMARRRRKKEPRKVSYKLYVRRVLKEVHPGKEISMRALNIMNSFVIDALDRIATEATRMAHYDRRKTVTLRDMEFSCRLCLPDIMAKHANQKAQKTVTKFYAAKVRDRMRRTELRRGEFAMMQMAAM

SEQ ID NO: 165749 - protein, 187 aa, Heterodera glycines
MRKFAYFKLCQAVLTSVFLWQILSTHQFCGEFDEPTAFFNSAVSSSHCEQFTLIGMDSTTGEYGAMPDKQKWHMQLMASSGSGQPIDEQQQNHMDEFSSKLPTVGRHCIPIAFSLVKPWVRDNKSHLQKVADLFAIQLLCGLLSLFVIAMHVLDQPRSWGYESIDYERTTFCAVLWCCPALVSSVLL

SEQ ID NO: 165750 - protein, 97 aa, Heterodera glycines
PFSLHLANFSDSSFCHLAVTQMPCWTGIPLANERKPSAAAAADLFIFCSFSFQIFQLAYDAANEAFDIYLFKLYLNLYIILSQQNVMFCYAQHKFLF

SEQ ID NO: 165751 - protein, 106 aa, Heterodera glycines
QETHIVLRIASVCSLLAIIDTVITLPSLYSEMSQMNNKLRNGLEAFRVNTDSAWTDLMDVQVVLTPPTKPRDNPFNSIFSTKHKLPGHCQCAGLQHPSCPPGPTSP

SEQ ID NO: 165752 - protein, 128 aa, Heterodera glycines
RNNNCHPHAILKFPHRFFRIIFAQNGQFVGHAFPRRPLPFQCFIFAVSHCHGFSLPRCFFAEFGHCSVECLFRGEHLHLCADAFAAAAHFAHFPYLPQLPSQCLLSHFVHKWRHRLTSVGPVTHLRRA

SEQ ID NO: 165753 - protein, 202 aa, Heterodera glycines
IFASIINITQSNDAEKPKGPKVTEKVYFDIKIGDESVGRIEIGLFGKTVPKTVENFVELAKKPKGEGYAGSVFHRVIKDFMIQGGDFTKGDGTGGKSIWGEKFPDENFKLKHYGAGWLSMANSGKDTNGSQFFITCKKTTWLDGRHVVFGKVLSGMSVVRRIEATKTLGGDRPEKEVTIAAAGQIPVETPFSVHKEDSRDEL

SEQ ID NO: 165754 - protein, 209 aa, Heterodera glycines
MVIYFLFSLFLYSSLVPSFSLADSLSDFFSRSTHTNNWALLVCSSRFWFNYRHVANVLSLYRSLKRLGMPDSNIILMLSDNIPCNARNPSPASIFNNAFAHQNLYLEDTEVDYRGYEVTAESVVRILTGRTHTDTPRNKRLLSDSQSNVLIYLTGHGGDGFLKFQDSEELTNVDLADAIETMHQQNRYNELLLIADTCQSESMYQRVYS

SEQ ID NO: 165755 - protein, 78 aa, Heterodera glycines
WSIKKKILLKMSKQFLLLALLLLLLPIGTLQECSWDVDLCTGSCSTGCEQLSEPNCFCGKEFKPFIRENPRHLKSAVN

SEQ ID NO: 165756 - protein, 151 aa, Heterodera glycines
MCSKFRSMMANSEIEVKLPSNIVPLRELQRYPAYNNDLVAQKMARFLFVNMMEPFSRTKLSLDEFLLLRAILICHPGAPNLSRPAQKLLQSESERYACILLHFLQLKHGCFAGASRYAEIMQVVESMLHSQSKQFAYLGHLADVMLEAPKE

SEQ ID NO: 165757 - protein, 207 aa, Heterodera glycines
KRRRFPSRVQIIYLLCPALALILSITQALTIHVTVTESIYTVRFLLVKLLGVLLEVNRAGRFSIEQYFECEFFNDDDIVKPPCAGQIHDSVLSKSTMTVVMTIHVIPIVIFIYLLVRNLKSDKLEHLFLYIESVGTDLSAMPGEYGDAEKGGYGKMTHGAYSSQEQQTLKETLNDLLLGFNAKFMPKRVFCDSMSKQQKVNGSNSSS

SEQ ID NO: 165758 - protein, 134 aa, Heterodera glycines
PKERVCYDNHECCAVWATKGACKSAPRYMNTWCPGACRYDGCLPQAVKRAAGLDYYSQCKRWSIFHEKYSHAEGWRSYRPNLVLRREKLRNECERNPHWMACNCPQACSKVKRLKEDCSQNMPKDYVLEPVDNS

SEQ ID NO: 165759 - protein, 105 aa, Heterodera glycines
  unsure (1)..(105): unsure at all Xaa locations
VSAIASSCSLVAIICTDGALPCLYSQIRQMINTWRYVLQVFRXAPTRGWTDLMXLTLVLTAPAKLRHHPFTSLWQDLHQLPRFCRXAGLQQPTCPPGAPASHTDP

SEQ ID NO: 165760 - protein, 190 aa, Heterodera glycines
LEGDPAKRGIIPNAAQQIFDEIEGRREQARRSGKVIPSLEVSAQFIELYNEELIDLLSPDRGSSSIKIMENPTSHEILLMGASSRIVKSQEDIMSALVIGAQNQTTAQLQRKYAALETRVREYETELENGREQMERAKRYIVDQENRPEKDARRTLLKLAEMFESPIPTTSNVARLRKQFDDDDNDADDN

SEQ ID NO: 165761 - protein, 216 aa, Heterodera glycines
EIYNHWLNDMRQWDEEYPSLEFIEKKSKELVTVLSEPPRGPPVDVIRLATIEAERENSTKLLKKLKEWQEEQKVGNAMHQPFPPPRQPFYPPSRPIRFPHWPFHHDPSRPRPHLMYGRSVGYHPYANQFHRPMTQARMRSPFCYGTSQPFGLYRYPRNIPANSASNFQPEALKNSALKKSQSAMEWTTNRPAPYFPRNDYAAFSTSQVGNARGTWF

SEQ ID NO: 165762 - protein, 215 aa, Heterodera glycines
QPFYSHVRVGWAQANAILQASLGYGKFGYSWRSKRGTVFHDAYGKHFHGRDFRQGDVIGCLIVLPSPEEIAAQGLAPSDVMPASRKDCDLIKFKQTYFFEEKDEPQQAQQRLKPLQGSKIEFFLNGDSVGVAYEDIFFGHYFPAISLFQSARVRFNFGPKFRHAPPAIRKGTAQPMSARPEQQQVEQALADAVFMTVNVEELVQRNEDYFAALAA

SEQ ID NO: 165763 - protein, 195 aa, Heterodera glycines
ADAHQSLSRESAQCNKNAHQILHKVLTQLEELLNDMKSDVSRLPTTLARLRPVTERLGMTERAILGRLTSKDPDALAGQSPLPPPGPFVTPMAQSRFSGIQPKFAALLKPKHQSKKENLPEKDGNDKQNQEETRPSKEEKRTDADVEKTSDRSTKEAEGSCKEEAEPVQDDTVKEDSTVEEKTKDSDLSSVQQPN

SEQ ID NO: 165764 - protein, 158 aa, Heterodera glycines
QNWPVADPSLLSDQSPRFCSLRPKWASNAVPFRAQFRLVPPTTMPPFSLPLRAPFLLPPSPQFAISLRFPLRHPRNLPFAPQAHFANGPKWRPRVAFRAMIRFHPPIVDHHFPHHCPHNCCLQKCIGSNFAICRVPTKELRSFFATKSSAFHPWHKLC

SEQ ID NO: 165765 - protein, 200 aa, Heterodera glycines
MDVIEYESPREQTEISANLLSDFGVTAQQAYKIAVTFYKNEEKANPVSIDYLYKLRFMALSKQAKYGTYREEVADCGWFDIMGNEAKKTWKRISDLTSEQAMLEFVRLLDVVCPSFRAQLEIERKAKTNEPNQKATIDNPSKDSNGQSKNDCHLNVLVDSASIRAQEVLEQFEQQKRQIQEALNKQTYHQFLAYAQQTHP

SEQ ID NO: 165766 - protein, 85 aa, Heterodera glycines
RIGENLLTFIPEEIGHLENLKSLYLNDNPNLHSLPFELVLCSSLEIMSIERCPLSQIPSDIIEGGPSLVIQYLKMHGPYRGVLNM

SEQ ID NO: 165767 - protein, 219 aa, Heterodera glycines
IHWYLAIIVNVRHGICSLNTTDNESIFPTSSHYSPVPHLIVLNSLIDPAEDKHLAVRDQLGEYLHLEYADKLGQDTKTYFNKQMMDVVVPTMLPQQKNFIDCGLFLLHFAQLFLSNPPKFISRHSSFRRWYPTFKIKHKRDELRSVIMQLASHVKSSDFVQLPTPKRKNKKIGRRSQVDKMQMILDGMALMGRTRRYSDSELDGIMKDEHFSCLYRPRS

SEQ ID NO: 165768 - protein, 47 aa, Heterodera glycines; identical to SEQ ID NO: 153004

SEQ ID NO: 165769 - protein, 140 aa, Heterodera glycines
LVPNSARGAFTGAALYINLVEQPSRLQLETAAALKQFKESYTRAIPMQAGLAILSGIVGIGGTIKTGEKAWAFGAALMLANIPYTFLCIFPVNKRLLATNEANADENTRADIQRWGRLHAVRTVLGLIATGVYLYAVSKE

SEQ ID NO: 165770 - protein, 96 aa, Heterodera glycines
GVLATTPRDGTRRNPFQQDASIIRDREIQSGQVGPCGRTLAGGNNNMQSGVQEILSEFGELPLVAPGSALTMTVHQVNADGAGPYTCEVSMDGTGA

SEQ ID NO: 165771 - protein, 181 aa, Heterodera glycines
MKVDKFLDKLSRKLSSSSLCFCPAINYCDANFGYHRKASTNERQKEEAAEGAADEADQCSHISIPVQYRKHSSTSETSSLYDQIVEAEVENEETMTETFWVRRQQQHQLVQATIFPISKPFARGTIRMAKMPKRGSSKKRRNSFPAGIFNERFTDDLVSVQLTISEFNMAKKCEALKNMKQ

SEQ ID NO: 165772 - protein, 215 aa, Heterodera glycines
TIDRLIASLVDCCVVFKFDGWLINIESEVNSDSVDYLEYFLFSLRNALHDNVHKDAKIVWYDSVTTDGKLSWQNALNANNLRWFKSVDAFYTNYAWKEEHIQQTVRTFLSTSELFPRKSLFDVFVGIDVFGRGCLGDGGWNCVQPMEILRRYALSVAIFAPGWICEKFSGQSHRILFDNSFRFWNSLSTFLYPHALRQRNFRTDFAVAFASERPN

SEQ ID NO: 165773 - protein, 220 aa, Heterodera glycines
  unsure (1)..(220): unsure at all Xaa locations
VAFILLLLDRKLSTEFRDFLGENWQYEDGTTDRLAKSAQNRIQSTACKVQLRNFLHDIAFKRHWPVKEIAKNCDDLFEVPSAANALKFRPFSPGTSHVKILFLLQLNGRDSRQLRRLFRSLFLPRHFYFVHVDSRREFMLKXEESLRAEGFANFRVAKRRMATIWGGSNLLDLFLWTVAXTLGETNSNWAQWDYIVNLSETDMPILSVEELEQNLAENRG

SEQ ID NO: 165774 - protein, 94 aa, Heterodera glycines
KNATNSLKSNEFEEAILKYSKTVTLNRDPIFFGHRACAYCRLEQYDLPIQYCPTALALDPNYAKAYWRMGVALSCQNPYHCACDAYNKVLELDP

SEQ ID NO: 165775 - protein, 189 aa, Heterodera glycines
TMEVDVSSSSDSATNVLFSLRADRSLLDPTFDRYILRTEKLAMFKRRMDDKIRFKLPSDSQWGYQQIRAHTLASHLFFDHFASSVDQQLFFAFLDDLRLISFTFDRTSNRWSVPVQVADIGTSSVALSPSFVFVSEDDASSQSFPESLHFVDSRTAITARGLNTFSVWDTGERRPTDWTTQKWRGMFHY

SEQ ID NO: 165776 - protein, 160 aa, Heterodera glycines
MMSSSSFEQLSCEIAELEKLRQQSQLPNVQKAIDELIGRWKVKKEEQKMKTDKGTAETLSAPTEAPKLISGSVHVRPTKKLTTYAFDESDKFVKLYYSLPGISDSVPGTISTDFRGKLFSIVCSTSRGLTTKIQCKDFGRVFEPEKLVGNQKTVTNGYFA

SEQ ID NO: 165777 - protein, 86 aa, Heterodera glycines
SDKHSEGLGKYCNSHLCIFCFSILSVWDDEDTLISAAVPVSSEEKLEESAMHTSGQLNADLALSDSDEEQLMCAKKPKLDDFDASL

SEQ ID NO: 165778 - protein, 144 aa, Heterodera glycines
CPSESTSNQQLLRRTSFSSACSYFIIFHLSLSKCDCFLMSKMPSLNSSLNRPKVSAKLNRPIAFRRPFPFTCRLHCLPLGYCVRFPRVPKSPPIRRFSISRRSTTVSSLQVATPTFASVPRSCPSVSFPLPILRPSILRRRVLW

SEQ ID NO: 165779 - protein, 212 aa, Heterodera glycines
MSSIPILSSFSRALQMRQHPLLFGMIHVPALPGSPLSKLSIAQLVDRVSAETEIYAECGIDGVIVENMHDLPYQKGIDHGPEVCATMARLCAACAHTLGANRRPKMLLGVQILAGANRAALAVAQAAEFDFVRAESFVFGHVADEGWMDGCAGELLRYRRAIGADQIAVVTDIKKKHCSHAITADVSVAETARAAELFLADGVILSGAATGE

SEQ ID NO: 165780 - protein, 215 aa, Heterodera glycines
LYSDSLARYGKSPYLYPLYGLGELPQGFARLSSIYGGTYMLDKPVDEIVIENGKVVGVRSGGEVAKCKQLYCDPSYVDSTRVKKLGKMVRAICILNHPIPNTNDAPSCQIIIPQKQVGRSFDIYVSCVSNSNQVTPKPWFIATVSTTVETENPEAEIQPALQLLGPIFEKFVTISDLYEPVDMGYESQIFISRSFDATTHFETTCLDVLDIFKRG

SEQ ID NO: 165781 - protein, 169 aa, Heterodera glycines
MDQAKQCLSRFWHWLRIRLIALWTFLKWVGHEICCCGICLQEEDDVEKGRTKNPFDQQVTISTTAMSAGTQNATGQGHVHKVIMVGSGGVGKSALTLQFLYDEFVENYEPTKADAHRKQVVLDGEYCAVDILDTAGQEDYSAIRDNYYRSGEGFICVFSITDLDSFDQL

SEQ ID NO: 165782 - protein, 215 aa, Heterodera glycines
ATAAARGLTAAGRRGRRGVAADAELDRATAAGGRRAPAATAAAPATAARRGRWRGFWAFAANCQLNGTAAAAAAICTITATTTSAAAAAPATAARRGRRRAWGVAANCQFNGTAAATAATSAATAATAAARRLTTAARRGRRRARRVAADAELDRATAAGRRRAPAATALPTETCRVGRNLKAGEKRMGKGRDEKEEKRTFANEGHLDKGKHKLG

SEQ ID NO: 165783 - protein, 109 aa, Heterodera glycines
MIPGQCSQTLCTLPGFTTYLGSSHSVATRVSLINAARENSPGSLPEEEKCKRKRSNKKEEESRRRKRERERERERKIRVRGKTDRKETDRAECGERERERDGSNTAYTA

SEQ ID NO: 165784 - protein, 207 aa, Heterodera glycines
IKTNLARQRFLEALIVSSRGTSTKKSDAGNKKLRTLISVRSLRELVNRMVGNDKVATDKSESDCKQQSSVFPYLLALHSAIDFYSILDEKFTDCISTDDQPIAEIEACVKHLSQIQCDRTNPLLAKALSILEFVYDNSGSSAIASSLLNIAKCRLELNDFVGFFNLNLYQTFDNNAQVGTPITAKYDENNLSTKIPTNLLAKLGATL

SEQ ID NO: 165785 - protein, 119 aa, Heterodera glycines
MHFSSVLLLLLVNFVLLLLLRPSVDAFPHPPPWAGPPRPWGWGQRPWGGGGWRRRHHGRGRGDSGSSERGGGRWRGRNRGDDSSEEKHRGSKYQQPQQNAQSVAVAIAVAGGATGNAAG

SEQ ID NO: 165786 - protein, 136 aa, Heterodera glycines
PPSVPSSSLSPVPPSPRPNSYIDSSDWDQLTGPYARQPWYYGHITREQSDTLLKTRGVEGDFLVRDSESKPGDFSISLKDSAKNKHFWVQFDAASAQFIIGNRRFESMEKLILNYMSSPIFSDGIVNLFLRKPLPK

SEQ ID NO: 165787 - protein, 216 aa, Heterodera glycines
  unsure (1)..(216): unsure at all Xaa locations
SVINQNPSVTKTSNVGENARMELAQKIEGQITGRIDGIRLLEREDGLLVVNEDRTLRVLLKPESEMFWPSIIHDLPHIPTKLTCSEQKNTILVGFANGQIHEYSIENYFNNISFTRQWNSHTQSISGLGSSQPLEQIVSCSKDKTVGXQCTSTTRKIASYCTGTPCTTLQFNGHASIDFVGDSSRDMSVLRLVVGTQHLPLLINTLSAHTAAITDL

SEQ ID NO: 165788 - protein, 167 aa, Heterodera glycines
MRELLFKTANQEQHTFTLEVEENETIAQIKQKIEDRFGLAFEADEQVLFYNGRELDDALTVDNLNIEAPNFIVVFVMNDLVGADEGEMLVQPMHMNDHPAAAQAGYVNDHAAHHHHHHHHQHHQQQQQNGMLIDHNVWQQILAPVQQLVQLTAQDYPAIRRLMALGF

SEQ ID NO: 165789 - protein, 30 aa, Heterodera glycines
PMESDPSVPSADGLPNRPINSRDDVTQLIA

SEQ ID NO: 165790 - protein, 212 aa, Heterodera glycines
VASGSADCTVVLWHFSQHLGLLVGDYNMPGEEPSPRAILTGHDSEISAICVSAEHGIVLSGSTDGALLMHSTQGDLLRSIICSNGNGTDTLAPINNILFSRDCYIAAFIGNDSLATFSTNGQLLKQRGYKCAEKILCAILSRDGEFVVFGTDNGRISILRLFTLQLLYTFAQCDSPIRSLALSTNQRLIFGGLDSGAIVVFNVDFNRWHHYG

SEQ ID NO: 165791 - protein, 207 aa, Heterodera glycines
LKGTLSLLERVLMKDVVSPVPPEEVRAVIRKCLEDAALVNYTRICNEAKIEQRMGLDVSPQQRIEDMIRVTELCIDLLKENEEHHGEAFAWFSDLLADHSEIFWSLYSVDLDAALELQPPDSWDSFPLFQLLNDYLCIDQNLRMGIFHSKLISQFSPMVVRYIDLMEHSISQSIEKNFCREKWEVRKDGCSTSEDVFWKLDALHAFI

SEQ ID NO: 165792 - protein, 60 aa, Heterodera glycines
RSEIDLRRPLVSLSFGQSAVFLIGGRTPDLPVDALLLRSGVVLVMADFQRIAFHAVPRIL

SEQ ID NO: 165793 - protein, 106 aa, Heterodera glycines
MAPSQMVKSSQSHTDGFCQLLHHQSRPPCASSSSSASSSGYASMALSASSSSSASSSSSACCCAENRLFLCSPQQRGLTFPSPIRPSGECSSSSSSSASSSASSSS

SEQ ID NO: 165794 - protein, 104 aa, Heterodera glycines
GKPLRVNVTTMDADLNELIIERDSLGQHLFHTVCKIIGLREIWYFGLCFTNRKGFTCWLQMDKRIKDPSVPKQEDGSLHFLFLVKFFPESVNVELIQDLTRHLY

SEQ ID NO: 165795 - protein, 213 aa, Heterodera glycines
ASPYPKRLLEHLDQSTSEGAASPSADNESPAKRPMKAFGQIWPIASAGRPSTTTPTRWSKSARRLLPIHERGSPCDAPESVQKAQSSDNKSDQSENNSNDKQQHVDEQLEKLPRMDEQQKDDEIVLVGSANVCVVLPEEEANENRHQQKRDFEQPNETISNDSDKTATDLGTVSKESEENAVQSEAMFHKKLTTDNKSETFERIKNKLDEQQE

SEQ ID NO: 165796 - protein, 191 aa, Heterodera glycines
QRRSDCTNLFAGATLADDCYPIHFDADRQRLTLSWADGHESAFGVRELLSWAMFSQKHYGEEWEAGAECPSRSLWDARGLREVPSVSSSEFDFALFARLFIRFGVVSVSGVNSRDERATHELCETVSTIFGTIFGQFWTFGTGLDTQNEMESHDDTAYGSEAIGPHTDGTYLDQPPGIQVFHCLRPAPRGG

SEQ ID NO: 165797 - protein, 121 aa, Heterodera glycines
RRLWHGWKGFAFCASAKSAAGAAGTNDHHPHESRRNVADITCYKCGEKGHYANRCTKGILAFLSNTATASDQQREQPRDNQQKKYAGGEGGRKRKMTDRKISIDILFCKFICCYFPLSEKN

SEQ ID NO: 165798 - protein, 161 aa, Heterodera glycines
MSLLFVVSMFVDGCAILWSYWDRFKKPKKKIFISADCWLCVFDLLAPSQLGLGISMISHRFDYYVDEHFKTRKWTLKSIRIRRKIGKNGTKQMAIVNYDWKPLPIPKIRMPRKVIGFKSIRILFIDRNAIAFLRHFCQIFAVCPINLSIHTDNDDYRILEF

SEQ ID NO: 165799 - protein, 213 aa, Heterodera glycines
SVLGFNGSFHGRTLGVLSITRSKPIHKVDIPAFDWPVANFPRYLYPLDENRQYNTEQDERCLAQVSQLIDTQKSAGRDIAAVIVEPIQCEGGDHNGSAQFFRGLQEICQDNGVFFIVDEVQTGGGICGTFWAHEQWNLPTSPDFVTFSKKTLLGGYFYKDELRVNEPYRIYNTWMGEPTKLVLLEKVVEVIGRENLVQKTGQIGAKLLDGLKA

SEQ ID NO: 165800 - protein, 218 aa, Heterodera glycines
IWGSERPDEWVMLGYHFDAWVFGAIDPNSGTAVLAEVAKGLAQTVRTTGWRPKRTIVFCAWDAEEPGLIGSTEFVEEFADVLRERAVVYLNVDNISSNVTLNIHAVPSLYQAAVDASKSVQNPNGQGSVFGPWIENYPSRTSWLPDFPHMGIPGGGSDQKSFLDFLGIPVMMITYIDPKRGQYPLYHTRYELPFVHEHLFDNNQLAVHKARGEYWAEL

SEQ ID NO: 165801 - protein, 161 aa, Heterodera glycines; identical to SEQ ID NO: 165798

SEQ ID NO: 165802 - protein, 95 aa, Heterodera glycines
IPKEGSPSGQTVWKQPIAILVFVCNRLEAAKTHLQKLIRFRRDRKELFPIIVSQDCDNDSLQRMIRNEFGNEVQHIKHSSSESEHLKPPREHRQF

SEQ ID NO: 165803 - protein, 181 aa, Heterodera glycines
LTNGTVSAPGTDKQLSLEEAVLRKDRIHRKGFFLLVWACLLCYLLSYLPGASAEQGTVEALHTRWEPEAIGPITFSDINYDYEDYGQTTEEPPTTTPPPPSTTSPPPTEPEPPSATTPNPTVPTPTWCPVVITGLAALVVLLCLCLCCCPSVPQSVANWCRRFVHRFCTCAGEGLPRTTAQ

SEQ ID NO: 165804 - protein, 167 aa, Heterodera glycines
RKMAANISEKDEALSDLNCLFVQMKNKKFSFSLMSKVAQKFGDGGVAAKVLLPYEVYKEAVDLLASARFEIDYRVVIHFLPTFKAIFLHLSFDDWQLAMERFFEITELRQTHRGFPREEMHTLSHSYSLALLENANFNKETERTSEFLFTDYGDLANFIDNCFECQC

SEQ ID NO: 165805 - protein, 161 aa, Heterodera glycines
LPSRLLRVQLHKFCEPIVRMRYPKLVENVIDTLMELINEGGAPSDPITVFQFVGLFRGKSFVAFVENISHEAWINSNLASGHLSSIQTVMDPLRGVPVVPPLESLRHIALVLSSEETTQSATSSIEKYFRKASSDLRTDLAACFLCLLEHKKTLTRCGACR

SEQ ID NO: 165806 - protein, 176 aa, Heterodera glycines
VFGKFKYSTNIDYSLGSLGHEEISCNYIDLSYIRVNSPELVSEFDGKISIFVDAVDRTVSDGYFLTGSASISAACAAPSQREGRIYGIDRWETLFPVQIKLEFYQRRKRQWLIPEDTAPWEVWELQLNLVRTLSNEDFFRMREFTAEKLSDIVFHICELINKPQYLPKIPSQPEIS

SEQ ID NO: 165807 - protein, 212 aa, Heterodera glycines
KQRIDTLIEMERQMHEDDQSIEENNIDTIELSLGELRSDFPNGFAVDWQKLFNAIVPDRNFTASSTVLLVAQKMNGRTERQTPLDVMAEYMRNFGPKNDTLNKWEQYVEWLLILQHAALSDNKIFHRIFRRHPRSANAMMSALLVNKYFFERHDDEQYIRDGTSEERRVAQIRHNCLEQLKHFFPEYVDRMFALGLNDAIEEEAKTVLDNVK

SEQ ID NO: 165808 - protein, 163 aa, Heterodera glycines
MEFLYAETFPLSFSLDPFKKGWFERVAPCSLLAFFVNKNALMMFKGGQISQRNVFPPGVNRNFHFCHFCQSNPPPRFFHCPVCNFGVFRRDHHCSFTVSWVGHFNQRYFVAAVLNLRPVVFSCCVRNWHALLLPFSPISLPDFLKWVFPQMVLLFRFFSFHHF

SEQ ID NO: 165809 - protein, 209 aa, Heterodera glycines
MSNFIIMSQIPWEKIKYFFVFLLSLIFLFITYKNYGFLYDNSALFRFTYTENNSVTISPEECCGENMVYTLKMNDSRIIRGKKFNCSLTWLLERYKLSDKYAIKEKIEVKYPGHPKFVFVTAANNHYYPYLRTFIANIKEKFGCKQKIIAYDLGTVTKNKEWMNELDSVCNFEWRIFDFGQMVEGRVRHPKSYAWKMFVMAHVLLEYDT

SEQ ID NO: 165810 - protein, 139 aa, Heterodera glycines
MRSEVPAPHALGRSRSLADVFRSNSRYAESQFSPTVVPIGMPSKPISVHRPYFTYSAYWPYRYHRNFNTYDNQITDSFYWHYPFRLWTSYKHNWYQYDSPYYYRRYHDNYNIFYNTELMSYGNRSKLMENLYQGTPITQ

SEQ ID NO: 165811 - protein, 126 aa, Heterodera glycines
RWWASMERNGRVLPLCGVPPSKGMARTRWRTWRRRTQRIWTWGSRWTWQLRQRTTHGTHAPLRNRDKELRRQFSEEGRNVESVFRNFKPFLFFALLSHPRPSGRPSSYSSKISFLFQLPIFMTFPP

SEQ ID NO: 165812 - protein, 101 aa, Heterodera glycines
GICVGLAINKSLCAGIVFNPITDELYTAIEGKGALKNGFPISVSSAKALDQSVICQTFGQHNIKEKGEKWLDNAFGNLRSAVLSGTHGYVSSFLSHQFHDH

SEQ ID NO: 165813 - protein, 66 aa, Heterodera glycines
ARNGAKDFRANTDSACTDLMDWRTGVRPPPNPRDNPITSIFRAKLLLPGCCQCAGLLHSSCPPGPP

SEQ ID NO: 165814 - protein, 197 aa, Heterodera glycines
GFRASGGFRNIYRGAPAVAVGSAPGSALFFITYCNGKEMLAQQIGTSIPLPLVDALSATFGELIACLVRVPTEIVKQRSQTSRASGLLQIVTELYRTRGGIRGFYKGYVSTVAREIPFSFIEFPLWEWLKRRVAHRMGSCSPLASAACGSLAGLTAAALTTPFDVLKTRVMLDRDRRTRLLPTAIQILRNEGIARLY

SEQ ID NO: 165815 - protein, 124 aa, Heterodera glycines
MDTVGGVAIHPDGMCEACVSSGGILLKREGRMGHSAQFGAAIWAEQCSASSSSAAANSDFGLSVAVSVSGCGEALTRTHFAEALAQQILSMDVDDLAFVQCITHFLDHHFVRSRRLCSFPSDRL

SEQ ID NO: 165816 - protein, 161 aa, Heterodera glycines
DLMDETWGTRPTTNPPEDAFRSIFPVKPQLRGRRQRAGLQQPSCRPGPTSPSGPPGQPGQAGCERLHGQAEHPGQRARSCPRQSIHWAHCPAGPACRPVGHGPPRQQGAPGQADTTHQGAGTGNCLAPGAQGTPGKGRHHRKPGAHPGQRRRTANATRARP

SEQ ID NO: 165817 - protein, 73 aa, Heterodera glycines
WLFLNAIVHLLYVLTGYAKRMRSTRIARSNRHRIRRQFSYWHNHFDLVVEWQFDGAKVAHGLPTGAMLWDNSR

SEQ ID NO: 165818 - protein, 201 aa, Heterodera glycines
MLAPIPIIEPATVTVPPNEDVVGSYDENQQREEELLVNQFVINSEAIKRILDDPRYADKKVCVVSVAGAFRTGKSFILNFFLRYLRWRSAPSVDEMVNDWLKMDPKLEGFSWRGGDDRDTNGILIWPEPFLLEDRNREQVVVLLMDTQGIFDSVSTFKNCATVFALSTMVSSVQIFNINKTIQEDHLQHLQLFTEYARLAL

SEQ ID NO: 165819 - protein, 166 aa, Heterodera glycines
  unsure (1)..(166): unsure at all Xaa locations
IEHFYEPDSGEVLLDGIPVRDYDHQFLHMKVALVGQEPVLYGRSVEENIGYGYENATPEAVQRSAKHANAHGFIMDTQQGYETDVGEKGGQMSGGQKQRIAIARALVREPAVLLLDEATSALDSESEHLVQEAIXKNLKGRTVLLIAHRLSTVENADKIVVVSAGR

SEQ ID NO: 165820 - protein, 110 aa, Heterodera glycines
  unsure (1)..(110): unsure at all Xaa locations
MVALSLIANSPVNYPPPPNASLFKILFYPPMQSVPLLAQLLATHFPLQIPSLSFSSCHFHLLFIPFLPFLCFFPLFCYFFCPPFLLPAQVEKINCXSKKKKKKKKKKKKK

SEQ ID NO: 165821 - protein, 204 aa, Heterodera glycines
  unsure (1)..(204): unsure at all Xaa locations
MQETHIVLGIASVCSLLAIIATVVTLPSLYSEMSQMNSKVRDGVEAFRVNTDSAWTDLMDVQVVVTPPSKPRDNPFNSIFRXQPAPPCPPQNIPCPRCPAGPPGRPGGQGPPGQQGAPGQPGTPAQGGGPGTPGAPGPQGQPGQPGRPGAAGQPGQPGANGVVSRPIPGPKGPPGAPGQNGNPGSQGQPGQPGGQGPPGPPGAP

SEQ ID NO: 165822 - protein, 118 aa, Heterodera glycines
VGNAMHQPFPPPRQPFYPPSRPIRFPHWPFHHDPSRPRPHLMYGRSVGYHPYANQFHRPMTQARVSHCFVLNWHFAYRCDLRFAMALLNRLAYIGILVTFQLIPHQISHRKHSSTKLL

SEQ ID NO: 165823 - protein, 107 aa, Heterodera glycines
FIRQIKRNKHNANVIELLALLFLFSDFDGFVPQLTKNIAEKGIERPTLIQKCVMPIILTKSEFDLLARAETGTGKTAAFLFPIIHLLESDRLAIGTKPSTGRKSPFA

SEQ ID NO: 165824 - protein, 170 aa, Heterodera glycines
MDERTNDRQMFTDSINNDLDDRRLRRQIANCNERRRMQSINAGFQALRQLLPRKDGDKMSKAAILAATAEFIQSLLREKDKLLEENCVVMAKKRRMDTEDAEKVILREEAVRPNVVDCLRTIGELRNSLQKETQLRMVYEKEMAELRCQLRLSPPSSALVALPPFPSPRP

SEQ ID NO: 165825 - protein, 115 aa, Heterodera glycines
STDKNHSKSDQLSDGGRLAGRLNGDGIRPKGGQKPKGGGAELLDDEGPKKPWPANCRNLNGLNCCSSLPDSSELLSSDAISDELFGASLCPLTKMAIVKIKATIKNLLAIICAIN

SEQ ID NO: 165826 - protein, 215 aa, Heterodera glycines
HIVLGIASVCSLLAIIATVVTLPSLYSEMSQMNSKVRDGVEAFRVNTDSAWTDLMDVQVVVTPPSKPRDNPFNSIFRAKRQLPGHCQCAGLQQPSCPPGPPGPSGPPGQPGQPGGAGQPGQPGQPGQPAPPCPPQNIPCPRCPAGPPGRPGGQGPPGQQGAPGQPGTPAQGGGPGTPGAPGPQGPPGQPGQPGNSGQPGQPGAPGQPGKDSGYCP

SEQ ID NO: 165827 - protein, 97 aa, Heterodera glycines
  unsure (1)..(97): unsure at all Xaa locations
RKRLFSGVRRLDAHSSLPYYASGSSDGSVFLWEWGDEQPVFVALAAGXFAQEAKLPFAHNGTRFAAVHGDALVFIWQAPPAVPPNKPLCHPKGSLQI

SEQ ID NO: 165828 - protein, 101 aa, Heterodera glycines
  unsure (1)..(101): unsure at all Xaa locations
NETLNVWSNQLGFAWDNYLQWWTLNESLPRVNAPIAEYWTMGTRMLXSQLCMLLSSAYHIIRCHWPQRRKQWMRADLFRASAELKGLDMIGLYTSWYHFPE

SEQ ID NO: 165829 - protein, 107 aa, Heterodera glycines
SSPVGPGARRGMSPPCARRGSPAVSTASAPQWEGRRGPPGPNGSPDVPAQPGLPGWFDQPGGPGHPGDAGKPGTPGTPGENKGPGVAGEIGNMGTCDHCPTPRPAPG

SEQ ID NO: 165830 - protein, 119 aa, Heterodera glycines
  unsure (1)..(119): unsure at all Xaa locations
HIVLGIASVCSLLATIPSVVTLPSLYSEMSQMNSNLRDGVEVFRDNTDSAWTDLMDVKLIMTPPTKPPDNPFNSIFRVSHQLSGHCLCAGLQKSSXPPGPTGPFGRPGQPGWSECPGQS

SEQ ID NO: 165831 - protein, 194 aa, Heterodera glycines
AHIPPGDNECLESWSRNYYRIVTRFASTISAQFFGHTHTDSFRLFFEDMNNSSSPALSVLYVAPSVTTFAGLNPAYRVYVASPSDGRILDIENYFLNLTALDGPEKEEKPRWQLLYTAKTEYGMEQLNAEAWNAVAQRIEREPAMARKFNRNYARRADAECDAHCVAERVCDIRAAHSNKTALCGGGSKTRRKL

SEQ ID NO: 165832 - protein, 194 aa, Heterodera glycines
MEVEVEAVAEAEAEEELDPKGRVQQLLEMGKSLEWEMAVQSDDEQILDLDDDLEMFPRLIFLQLAKFLKNAPDGLNEQQKKELKKVLVNWMEEQKQPFTVDEEMAQVDETVQSLSTFCDQIGKSFKGTPAILDIFLDFHKNETLETEKLEFMWKMVNRKVTHYVKSVGQFYGGIKIAKENLKQVKKIGKWAKKN

SEQ ID NO: 165833 - protein, 111 aa, Heterodera glycines
MDEQFKICIELHYEQKKKRELMHQIHMKEKASLELSTKDLTDQTKRRVVNERSSLDRKQRQLERLKREAERRGLRTGGDSLQGTTQNGKKNQSQQKQSPAAETASVEPIIA

SEQ ID NO: 165834 - protein, 195 aa, Heterodera glycines
ASVRLIDLGSATFDHEHHSTIVSTRHYRAPEVILELGWAQPCDVWSIGCIMFELYSGMTLFQTHDNREHLAMMQRILDGIPYRMGRKSKTKYFFHGRLDWHDHTTAGQYVRDHCKPLSRYMVSTSEEHQQLFSLIRSMLEYEPASRITLSEALRHPYFNRLDPNMRARVDGVGFDTSLNGRGSYASAGSSSSCRD

SEQ ID NO: 165835 - protein, 78 aa, Heterodera glycines
DVFCTVPRELMEPIDQRIRAIVEDIDSTHHLLEAKTTETDIKVFITSSLGHIFDEGNGIQLLIQHLKCDLREGTILVC

SEQ ID NO: 165836 - protein, 53 aa, Heterodera glycines
  unsure (1)..(53): unsure at all Xaa locations
IKVILEIGPPGRGKGTLCQRIEKNCGFLHVSAGDLVRXERLREGSTSGELIQP

SEQ ID NO: 165837 - protein, 141 aa, Heterodera glycines
MKYSFNVREIQSLLNGFMCIFKPRDVSISAIEKLLMRRICEQANCLDPCRPLPTIEMPIVEAHPKSGALVVVGRKKQIDYSKHPLMVGQMFRPEDMRIEALNYLEPSCSGVCVFGLNDGCDQLEKVRDRAWVNEYILRGRI

SEQ ID NO: 165838 - protein, 75 aa, Heterodera glycines
THIALGIASVCSLLGIIPTVVTLPSLYSEMTQMKSKVRDEVEVFRDKIDSDWTDLMNVERIGTPPWNLLDDAIKS

SEQ ID NO: 165839 - protein, 91 aa, Heterodera glycines
CFLFFGHFHPLWFVPWKTSIFLAFIFPADAQHFVRFANWPIASGLCQCHVRKAAQSEQSESENEEKTERKHFGKILREEIKRFFLMIRAII

SEQ ID NO: 165840 - protein, 198 aa, Heterodera glycines
PPTFAPFRLLRQHFDRLAVILLNSPPAAVVPCGDFAFPADWAKIWNSANIRLCTDGAANHLMKLCSDGTDQLKVPELIIGDFYSISAEARHHFGGFGNCEQRKVPDQNSTDLTKALEALGEKHPNLSGILLLGGFHGRFDHVLGALHALLLHVQQWPQVPLFAVDNENVLTVLPEGEMLVELDAERITGTCGLFPIEQ

SEQ ID NO: 165841 - protein, 195 aa, Heterodera glycines
MFDFKAIPWGLAKRRQSDHQVQCHHGANECTANQLLSCALKHPYSDKSKRHRLLNCFMAKMMSKREPENAMISCLAKSGLSRNEILNCARTDAVTRLQLEDETETEHILNSPRFVPFVSLNGWSHLTLQAPAQLLLTEKLAHWNDTLNGVSIYKRSALKLLPTPYRSCALPPDFWCSSDSSVTGACFDEQKCRTF

SEQ ID NO: 165842 - protein, 200 aa, Heterodera glycines
MFKLSQLFFIFIFSIKLIGNKCTKNGVASPFEKVIQKDANKSTPKIAEKNAENEEQNPLKKEIENLKARMDQELNKIIELKLGTQLLKMNEIAERIENEKTPLDKEFIQKVIEEIRPLYVEAIRDHINILVKLNFLENDKGFKKDAKNMENLNALENQLIANKACLIKEDEIVQTYHNERAELERKMKRNEGNETLDEYD

SEQ ID NO: 165843 - protein, 183 aa, Heterodera glycines
LFLAITSLFLNSICWWFFEPSLTTFMATLRLDWSASVMSGILIAVFNAAYMTSAPIWGFVQPYLTGQMRPMLLLTSVGMVIVMLLMGPSPLLGLPNLMITAVAFALLGIVAGAAYVPLFKWCVDAANNAGLDGTSSAICGCISGFIQSALALSAFLATSVGGLSAHHLGLPWTATLVAAIQLA

SEQ ID NO: 165844 - protein, 192 aa, Heterodera glycines
  unsure (1)..(192): unsure at all Xaa locations
THIDLGIATACSRSVIVIIVATLTFLYSDMNMMNMNVRERDEVFGFHTDSDWTGFVDMDVVVTPTPTPHDHAFPSIFLFRGQLPLHXHCAGLGLPHCTCGPAGPGGSGAPARPAEGAGPRQHAEPAEPAAPPCPCPNLNCPCXPCGAAARRRRRGPAPHRRARGHAETGTPGGGAGTARPAAPGRQSGPPQP

SEQ ID NO: 165845 - protein, 160 aa, Heterodera glycines
MALRRQRPFFRSFVPLLICLLPCLIVELFSFWAASFLWQIPPILNPNSVIILIISDPQLIGHINEPRWTGIVSRWDADRYMRRAYALASRAVRPDLEVFLGDLFDEGVLLGGDEQQFVDTRKRFMNIFPLNRYSTNRIYLPGDNDIGGEMEPVYAELYER

SEQ ID NO: 165846 - protein, 169 aa, Heterodera glycines
GTSGGGGGGCQPCCNPGPPGPPGTSGRPGRPGKPGSNGMPGGPGKPPSQPCESVTPPPCKPCPGGPPGPPGPPGPPGDGGGPGQPGQPGSDSGAGSPGPKGPPGPPGQPGQPGSPGEPGQPAQSQPIIPGPPGPPGDSGPPGPPGPPGNPGTDGGAGQPGPKGPPGPPG

SEQ ID NO: 165847 - protein, 120 aa, Heterodera glycines
LITDNRSEGDKAPTNDIIWGEGNSVILWGSAAVRRGEAFVARSPSFVRSSTGAILESIIVHRWGSRFLLLVLLGAAARRCLGPFGVVNHATVRSTAERIRSHEHVQEEAHCVVGEQQQQK

SEQ ID NO: 165848 - protein, 55 aa, Heterodera glycines
HIVLGIASVCSLLAIIGTFVALPSLYSEMSPMNSDVRDVVEAFLVNTDSDWTDIV

SEQ ID NO: 165849 - protein, 122 aa, Heterodera glycines
MNMNSSSSSNRRCSAPNSTTLRAAASALLIIIAASLVLPQCAAVGGMAELKALTGDAPYLGTGNQEQAPEFFGEALSRQYYQNPAYRYNDWYGTRFAQNYYRSPYRAYGGGGGGGDFGCGPC

SEQ ID NO: 165850 - protein, 171 aa, Heterodera glycines
  unsure (1)..(171): unsure at all Xaa locations
FYTATRQNLEINQNTKVGGQGFTGKQGTFHGQQMIEYCTNVVAGVSPSKTGTEHLGXPIFATVKDARKKTGADASAIYETAAFAAAAIDXAIDAEIPLVVCMTDGICQLDMVREKNRLLKNNRTQLLGPYCLGIMAPGEXQIGIMPGQIHQKRVIGIGSRSGTLTYGAVRQ

SEQ ID NO: 165851 - protein, 137 aa, Heterodera glycines
LLIGDSFHPERIFQMGPDFACLEWLMNAGSTSVLMSDGTLLKSKKEMQNFLSQKGFDLRKLKTEAPTAKLLKDIPLADALRPSASDLLYNEKWRHISPIHMKEIDASDSVITDEGFAYFLECRNIEKLRLNFCDYFG

SEQ ID NO: 165852 - protein, 137 aa, Heterodera glycines
SIESRVNDIRASVASIVSAHQQQRGAEGDGAVPRRDILDNNFKSAFVRDIVKGLDFLHSSPIGYHGALTSTRCLIDSHWILKLAGFGTSRLLYKWRHNGILSNGNGTVIQPLIPNEELHYYAPELRLTIRSAVLRNK

SEQ ID NO: 165853 - protein, 208 aa, Heterodera glycines
RMLVHRIAAFFGLLHNVDQSGQKVVVTKLPGTKLPDIEFEQLIKHNDFYDFHSARRNGQSFDESKGYRFPMREFRNRFNTTASEGANGGELSRNRRARSFEIDNDLYAGFPRQHLAFHRYSATFDNAGGADMASGNCSSSTSSTAISAQMHPLHLPMLQPPYANSSTEASLISPASAYSEPAACVRHQTAQFANSQCQIPCKNVTDSP

SEQ ID NO: 165854 - protein, 166 aa, Heterodera glycines
  unsure (1)..(166): unsure at all Xaa locations
FSSYTKKKKCFHLSIFVTLCLLISCLIPFSFDYDDDLFEIGTAQSVAVTGILTCNGRPSGGTKVKLYDVDTFDXDDLMAEGFTDEKEHFLLEGFETEISDIDSKXNIYHNCNXRTYPCLQKFSIEIPDNYITEEKRSPQKIFYIGKLNLEGKFSGQHRDCINRTFC

SEQ ID NO: 165855 - protein, 107 aa, Heterodera glycines
  unsure (1)..(107): unsure at all Xaa locations
SPVGTLTSLYSEMRHVNSKVPDQLEALLVNTDSAWIDLMDLQVVLTPPXKPRDNPFNSIFPAIRXLPGHCLGDLFQQARWPPISPGPSGPTGHAVHPVRPRQTGDAV

SEQ ID NO: 165856 - protein, 215 aa, Heterodera glycines
QMVVVSSMVDQNHKRQQPQQQKSNTRQISDAAEIGHLSETDQQQQQQQKQQEELYYAQLLAVQQQAIAMREGQQKERGTEQRQNGAETDGEAGDGGEDEREKREREVSERNTNLIINYLPQNMTQEEVRALFGSMGEVESCKLIRDKSSGQSLGYAFVNYERPEDARKALTSMNGLRLQNKVLKVSLARPSKDDIKGANLYVSGLPKSLTQFELE

SEQ ID NO: 165857 - protein, 207 aa, Heterodera glycines
MTKKQVTIVGSGNWGTAIARIVGKTVQMHNSEFDDSAVKMWVFEEVVEGRKLSEIINEKHENVKYLPGKKLPTNVIAVTDVVEASKNADVLIFIIPHQFLHKVCEQLKGNIKKSAIAISLIKGLATFHEKDIGLRLISNEIATSLGIDTSVLMGANLANEVADDHFCEATIGTKNPQHGNELKKLFHTDNFRINVVEDAATVELCGA

SEQ ID NO: 165858 - protein, 211 aa, Heterodera glycines
MAPPVKKKKKFSSDNHRLISSTEIGEHEQQSMGSLTTSFGKRQSLFRHAKKMNNRILRKIWICTDIWMDTFPFFDHAQLGLKLALISPRFDVLVDKHFNCQSELTIWREITIVKDTGSELNLTVLIGGKSVQFPLPDRSLPNKIRFDNLNIDYIDHSVLVFLRANKQIWDKGTNLSLYVCWSHNQNDNNNNFLPIWDVFVCKIWPIFAPNI

SEQ ID NO: 165859 - protein, 133 aa, Heterodera glycines
  unsure (1)..(133): unsure at all Xaa locations
IHLVGPISNQDRLELARQFEPLFGEDVSSKLKNALSGDSNELILALLEPTSVXYAHPMHRAMCGLRTLKGSGLIEMLLSPRKRPVDEMTRACXTLYRHPLEKDIFGDSCGAFPPLLPSVCNYTRDKRWSSDPI

SEQ ID NO: 165860 - protein, 84 aa, Heterodera glycines
ETLHDSLSKDPVFPVIAFKHYAALERRLYKIMEYLLECMDKQNGDLTQMVVNEFHNPTVAEPLPGEELETEEDETNDAPAGPPA

SEQ ID NO: 165861 - protein, 170 aa, Heterodera glycines
FRAESSKRKRLEGGGRKVPNRNFEEAVFQWVSELRQKKVRVTRNMIAAQAIKMSAAYEDMENFAASNGWLEKFMHHHKFSLRRPTTVAQKEPDAYKNIIINIILYIQQLIHKNNYTHVYAADETAVWLDPGGGTCVAEKGSKTVTVLNTGHEKARVTVLLTARSDGTKMR

SEQ ID NO: 165862 - protein, 75 aa, Heterodera glycines
TACRWRASDGTRRLWSWGWWSGLSPILALPELSQLRVRHSATARRRRWCGRRRLRCWTWRWCCCCCCSHGWRWLR

SEQ ID NO: 165863 - protein, 217 aa, Heterodera glycines
GVGIFESDNKLSPRPFFPWTEIKCISFKNKMFTICTADKSKIKFRAQDMSINQSLLDLCVGTHNLYLRRRQPDLLEVQQMKQQADEQRRRRMEEQVRLHREREQRAQAEQERDRYRAELNHLSEQLSAMQNVIRSAEETQVLIAERARLSEQEAIEQARRASEAEAEAQRAKLSQLRAEETKMLLERKIRETEMAAQRMAALQHQQQQKQQQQQNGI

SEQ ID NO: 165864 - protein, 214 aa, Heterodera glycines
IDEADVAAMSSNGVEENCEATTITSLDNELADLLRYWLPLGAATDHCLNVAMQWQQQKRPNAVLMSTISLLLVARGHIQRAFEHIFNEGVERRLDSTISQPPAADDRCVASLLELASAHPSDARRGDWLAKLFRHLLKALPEETEAKSDDNAAEFTASVVHEQMTRPNSQLFRLLCAIIEQQHHHDDEQEQDGLRDIQIGAEKGTSASVLVAEL

SEQ ID NO: 165865 - protein, 203 aa, Heterodera glycines
MTESDEGTNWVESHPCRCGAKNWTASHMERVMVKLCCGSEEVQNFGNNNNGAQKNGTPERKNSLAPPEPSRVRRRSINNWRPIAGIFAVNPKEEDFNDCVKSHQDSPHEAIHVLFKCNKCSREFDCTYEIIADERGKRQSFGHYESVSEPITIGNCCNEMHSYEHIQRIFAAMWDKDKFQVHYNNCRHWSDGFWWKVHPDEYQ

SEQ ID NO: 165866 - protein, 218 aa, Heterodera glycines
  unsure (1)..(218): unsure at all Xaa locations
NHWNSDCRKFSTIQQRVEIVKSKGLCFKCLFAHRTFDCPKPRKMFQMRTTSSQQHFAATLMRRTKSQRQQSCHICQYQARNQSKMLQSKPNQCETPSMXTDTRALLMTTTATIFNPAQPHLSMIASIFIDPGSHRSFVSNHTAQRLDLPIVNTEECLLTSFGERMPKKYISDMVKLGFLCINGERLIFNLNALQFLVNEMPMIQLSELDRDQLKQRKL

SEQ ID NO: 165867 - protein, 216 aa, Heterodera glycines
DSCAKQMVKTTKLSHLKKSRKRLKPLTGQATSSLASSSSTISTTSAHKQPFDCVDEARASGTLPTHSGRTLLRIDEDGNCVEIPMQRKPTSPVKKNCLDIGKPEMELLQVNGGQWEFVQRITNESQLYFYINRFNLVFGSSSKATGGRRYFNCIERGGSTKCPYRMMYMLERQVLYQTGEHNHSFSLLRRRKPTKINIKGLLPTPEKGGDFELLSL

SEQ ID NO: 165868 - protein, 170 aa, Heterodera glycines
FVGACAIGDLVKTTLGPKGMDKILVSGRGEHQNVQVTNDGATILKSIGVDNPAAKVLVDISLTQDKEVGDGTTSVTVFAAELLREAEVMIGQRIHPQVIVSGYRKAVRVAKDALENAAQASGEHLREDLLKIAKTSLGSKILSQHSNHFAKLAVDAVLRLGPNGALDSIQ

SEQ ID NO: 165869 - protein, 202 aa, Heterodera glycines
  unsure (1)..(202): unsure at all Xaa locations
MCSPTKNLLKSNDDCNKKESFPPAVLSVPSSQRCCPNSPSTSSGSSSPSSCCRQLSGYPVIPREQLEIGKQLGAGTYGSVFRGWWTKTDGNLLCVAMKKVFMLDKEVEILSQIRHRNIIQFYGVSVANPDFWIVTEYAENGSLFDNLHNKEQPLEFGRIIKWAVQIARGVVYLHYEAPLTVIHRDLKSKNIVIGSXNQCKLC

SEQ ID NO: 165870 - protein, 60 aa, Heterodera glycines
FNDPHPAGFSRRSPPGALIANNFRHFPRPYSMPHLSDFISNSSTVRKLVFFKCNFLSPPR

SEQ ID NO: 165871 - protein, 115 aa, Heterodera glycines
QIMHTQQNLFQPNLGVLIRHKLTINDRIFCAMPKRNMIYFWVPTKMPNIHLFHSPWYLSPVLPMQFPNMSNELFLLRGWLCNMCAVQMVRIFVAFLVVAQHRLGNKRAQIGLGRE

SEQ ID NO: 165872 - protein, 59 aa, Heterodera glycines
FYSFFMDKKMNIFLNEYQSNCALGIAAFPKKFSKIFPYSNAYTNISQIFLSFITEFWGL

SEQ ID NO: 165873 - protein, 158 aa, Heterodera glycines
LQLFFVIKMLRLRCPSRHFASSAASAMKARPTVEPVQQKISRLPTGFSVSSVELQIAKRTAEMQTLTTANCSSSFAADQACQLLAKGTALLSPHFQIGNITNKRTPQIVNSRWLTKEAALIGVNIEHDLLLDYAGPISQLMFAFRSGARFQQHDEAGL

SEQ ID NO: 165874 - protein, 217 aa, Heterodera glycines
  unsure (1)..(217): unsure at all Xaa locations
GTAFSAPLPTGEGTVDTGCLFYQKSPPRMADFDYSLPIYSTLSRIAIRDHNSFPLAEIWRLFHPFSVDTWLAIVLFIALHSFVFMVIEKIEFLVNRRTVAQMPIFHNILWRLLRLQLLQPKSVRLXHRFGFVHCVCFTSLYRSWIVTSLVQPKPAIPIRDASSFVKDVQQGKYTFVSQYRGHWFYESLNKSTTFPFKEMREGGAQKKLLQAHSIQES

SEQ ID NO: 165875 - protein, 67 aa, Heterodera glycines
FHSLLLFLVSIRRMYCRNANAVTPSAAVPLFLVDGEVNSLNKNSTPRPSAGEIQIFAENMGNSLIYD

SEQ ID NO: 165876 - protein, 51 aa, Heterodera glycines
FAEGSQSELIAFVRLQSVHAKVPRPIRTVRRRHSQFLHSAPTSLSFCPNFQ

SEQ ID NO: 165877 - protein, 213 aa, Heterodera glycines
KTNPMAVQTFQKNSIFTNVAETSEGKVYWEGLEDEIRDRDDVTITDWMGAPWKLGSPTPAAHPNSRFCAPAKQCPIIHPDWESPNGVPIDAIIFGGRRPQGVPLVFESFSWEHGIFTGACLKSETTAAAEHQGKTVMHDPMAMRPFMGYNFGKYLAHWCSLKQPGRKMPRIFHVNWFRKSGADGKFLWPGYCENIRVIDWIVRRLDKQRALAL

SEQ ID NO: 165878 - protein, 212 aa, Heterodera glycines
  unsure (1)..(212): unsure at all Xaa locations
DTANPPLNSPPSSQPLHSRLAFNGTTSAKINDTARHWKQWNSSEEMALAFGENKKAQMAARAMFDLVHQYGDNLREVLFLFSRPLRTGAHFTECSPSFSIXGWMNVLDCLLYMLKANLLPSPLVQLEDFVELSGFVSLKHCFKRRPTAPKKEESGLLSWLGLTGSSATGGGESGQSRPQNEQEKELAANTVAECHPEQIVLDSRYLASSSLT

SEQ ID NO: 165879 - protein, 187 aa, Heterodera glycines
MPGRSTEAHRALEQLEAYHALLTQPGDAELRYGIERVIGIFKANLFQALLDIQEFYDNTLLNERVPLDMKTTETRKLAERWEQSPPFGAVSRAFTPSSFDRPVFPATTTATPHTNGFNGEMETAITHSSHSYSYQEQSKQLTKDGWHTQEYRTQTVDGPSGFQTETVTNNGLIDDQGKAWEVEDVVL

SEQ ID NO: 165880 - protein, 112 aa, Heterodera glycines
AIRMLLLVVCDPTGWEALRTHNNIVHGSFIEAAQARGLLSDNNLWMNTVMEAFQTKKSIRQRIRWLAVFFATTNLSSPTTILDSILKDADNWLVNTSVAKASAEDQKQYVLR

SEQ ID NO: 165881 - protein, 44 aa, Heterodera glycines
FEISLGLNQNSLYCSQNLQRKECQVPKRQQVQFTISTDNKKYFK

SEQ ID NO: 165882 - protein, 183 aa, Heterodera glycines
MADQWQEYLARDQSADETFHASVKTADNGQQQQQANNVANNNGSQRVAQTNGVGLPNGGDDGALRFVPERTRIKSRMNDETDEWAEREEMMAQEDQMMMLKDPKHKDSLLSRLDTFRRNRAFCDVVLFVDGRELLAHKAVLAAISPPLFDLFHSNSASIPIDEENEHTLLPDQALELAKAASQ

SEQ ID NO: 165883 - protein, 145 aa, Heterodera glycines
  unsure (1)..(145): unsure at all Xaa locations
LLALVLHNACHELRTRYDMTRERLPRFSKPRPFCSMSSSDFAVPLILFVISTNDLCKCFKILYHRFGPSCLDTLKGGGPAVIYLVQNLMIFLAIEKXRTSAYMDTYRLKILTTAFFAVLILKQKLSIIQWVPLLILVDGAALTQY

SEQ ID NO: 165884 - protein, 206 aa, Heterodera glycines
MASQCVSPLPVKGSRRKHPLLANLLLVLTLISVFIGIGIAFFVRQFQPSQRTIDMIGFPGELFMNLLKSLILPLIAASLVSGLSQLDTRQSGRIGAFAALYYAITMVLAVTTGICLVLLIHPGDPSIKEHFASENDSHPANVSALEKLMDLLRNMFPDNIVQATFQQMETEYVEIRPPTNVSSTTAIVHAVHRHIDGMNTLGMIMF

SEQ ID NO: 165885 - protein, 58 aa, Heterodera glycines
EHWEKTLWEKERNLFDFRNSKHMTSSAHISRNGDLSSQLKFITIIFASATSKFSLFYA

SEQ ID NO: 165886 - protein, 154 aa, Heterodera glycines
QTLNEAEVLIMNFERGKTYFGGHCLWLNAELVTKISTINSEHSYAATPIQFGIGSPAPSTFTWPTTVTPQEQLVQYSLSSLSTSKQRLQFTCGRKKSFGRPSSQFQFGTCIRRPRLPSLIQTMDWRKVSATTLHSRTSFVKSVKAPTDDGRCPI

SEQ ID NO: 165887 - protein, 59 aa, Heterodera glycines
LLHLRLRRQRLRQLSNPRPSNRRQRRQPSPLSSKHLATDHFVNDGMCPADHGADQFLLF

SEQ ID NO: 165888 - protein, 186 aa, Heterodera glycines
  unsure (1)..(186): unsure at all Xaa locations
MYEAYTNEEIVSKLPIEASSIGSYVSKGKLFIGSRQGHLITCNQNSADTSKLHYEYQWLSRXDLIICLTDVHLSIHDAVEPFKLLDVCSKYKSISAFSHFVTESQTIHIAISARKHLHIFKYLLGELCEINDCAPITLPENAQAVVWCGVNNLILAFKCEFQFWDMDHFLHRDDLIDEKVTTNLFL

SEQ ID NO: 165889 - protein, 213 aa, Heterodera glycines
KLLPKTYGKRGAKEAKKRREERCEKAERARQGRWAKKTAPQPNLNAEVPQQDEAGPSTSAAPTEEAMEPPPPTPGPVPTPEMDEEILEFDDPPPSTPATPIGDLVPFPSTPTAPMDTGETTPPPLAIDERSERIEQLEKQLKDRYDTIQFLREQVRNREALISDLRRQLEQCAAPPTATPTTSKTTPNRGRPRKAIDELQRSSRKRLTEQILD

SEQ ID NO: 165890 - protein, 89 aa, Heterodera glycines
QETHIVLGIASMCSLLDIIATIDTLPSLNSDMSQMNRKVRDGVEAFRVNTDSGWTDLMDEQVVVTPPTKPRDNPFNSIFRVKRQLTEHC

SEQ ID NO: 165891 - protein, 70 aa, Heterodera glycines
MSDKKEKGGKDKEKKRRSKKSGKSAKKKTNERKTRIIKKEEKLSTGGEREREEAGRKSARSRSPAERRRR

SEQ ID NO: 165892 - protein, 169 aa, Heterodera glycines
MVRSLFDICLASVCQRSLVFDADLSLLPCDCKQRLMEFFASHDQLNSELCFGLMSRPMFGRNLTRLCFYLSDQLNDSILEALASFNQNLRIISIVECPRVTDTGIVSVTLRQNKLVCLELVGIPLLTSNALKAVNSNRLRSVDLSGCRKIASEGIFYLVFNNPSIVSLC

SEQ ID NO: 165893 - protein, 203 aa, Heterodera glycines
MERSLFAETSDGNIGNGGGTAPRHHQQEEGQLWHGHSESATSPMVASVSAKLLHLPPFHLGNKLISVKAFVRCHLESTFYNLSVLALHDCDSYRRMALLALHRYHLRLADSGLPNMSVDQGLDLLAVMADVDTFVADYCYDLNEQFFIERNEHGKTQLNILRVHQVINSVKTHGLGILHSLINSAYKFLRVQFQRLSRCLFDE

SEQ ID NO: 165894 - protein, 201 aa, Heterodera glycines
MSLMKMTTTLEMPNGPDESLWQECANDCAMFNYFSRESFQKCVQRYNGTFAEEKSMRVSYESMHAEAFLTALVNTRQTGRSYVGEFEVANYSNHANDMYFFIGLHQIPMDRLDLRLMDWYYPQMIKNFVKGKAPDIGWKPQNWNGRNYFRITFNVSDNGTLTDWPHGVDGYQDVAGLDFWLHELPLVEQNATRETEEEKEE

SEQ ID NO: 165895 - protein, 200 aa, Heterodera glycines
ENDPKKRIIKRKLPQLPVTGVVLPFNSGVKPNMARNGMARKALNPQAYEASAVKQMQSYKQTKSMELFKERGMKFTCVDSSQQQQEENRNGRAGGTSGGTLSSIGTVSACPVDMMDPSDREAIQFYEGERNGGRETKGSLAKSTEGGGFGASSLERAKRFGLIPPKFDPRIPPPPICQPPKRKEIEQPKEKRAIKQETEV

SEQ ID NO: 165896 - protein, 175 aa, Heterodera glycines
WKTKTDCPTSNSSWNMQAWEYVQMIKSILVLRQPAAPFELKEVISSLTNLFADSFQHDSRLRDIPLDKIDIWCFMRLFKDKDEDGQGDRLICISLAQRFTDESHYIMGASDAGQLPMDVPLISINHCLADFIKPEDIEGSRCAQCSNATPCLTVVDNSVDEAVEQEKAENCPTTS

SEQ ID NO: 165897 - protein, 113 aa, Heterodera glycines
MQMLGIRIPRHPPWLFNCCVSPPQSEFACLRVDRSLISGPSNFRHIGHIGAGDNLSTADDENAMGALLRSKGGPEFGMEVPAELRSSDVPIGVEKERNDGAAGGEGDGGAGDV

SEQ ID NO: 165898 - protein, 155 aa, Heterodera glycines
RVRLHKRFKVEGTDRKGNARTISFAKRSSAILDPRFGMIIWMICLENTDILLSKSIWKRGDGEEYDCLYSPSCEAPVSSGSWKLCLHQIELVWSLDAHVPFLSALWRRFGPLAQQTTSSFCQPQRKERPSTDGHRLNDFFFFFTPYFRLTNPHCV

SEQ ID NO: 165899 - protein, 153 aa, Heterodera glycines
GNQSLILIVDFFITNSGGKGQLKTENGQNDKKRKGGKSQKYSPGQRRRSRENGEHFGNRSSPNQRLRRSAEIGHGEEPKGGEGVLKSIRQGKSLEQQREGKPKHRKRERIGDERRAKIHGIGCDIHWHIMYRQARLASLFIALNVFHRREKTE

SEQ ID NO: 165900 - protein, 70 aa, Heterodera glycines
ARVYIGHLPSRATERDLEHFFRGYGRIRDVMLKNGFGFVEFDDSRDADDAVYDLNGQKLLGERVIVELSR

SEQ ID NO: 165901 - protein, 108 aa, Heterodera glycines
RKGCEMIGVLPFHAFSLLPPFSLFPLRMCHLKSKRPKALISRRKVIVSKKRRNEAEEVIGGAKVIRGEAKREDKALPPREETEAPRGGDFSVIVCASFCIVSFNIFFY

SEQ ID NO: 165902 - protein, 163 aa, Heterodera glycines
MPSLPIRDEENPGQNFVMCFHLWSPTNNGSGDAIVEFAESERLLSTNVQNSKANEQLHSLYSEYKVINIESCAAADSSTSSVLLNSDSFGSSMVQPNAKQLLVCFTVFAMFVLLSTAFACYICVVRRYAERMRTKCDHLLDEQRSASYNSTDNPYSVYAKSNN

SEQ ID NO: 165903 - protein, 93 aa, Heterodera glycines
FRIEQKDELIERDREALHANIELQEERMEEVEKAKELVNKAIQTLGQTLAKLNEELDEIKPLLLKLYRKRDKCRDEILALPKQQNTTHAHLDR

SEQ ID NO: 165904 - protein, 158 aa, Heterodera glycines
TLQRTEVAFILYAEIATIIVLLLPWVRSTMWKKVFNSRVVHKLKQFSNVYAYAFIFVLILLFIDATREVRKYSHVDTTTEMVGLVAEADAVDHMRLFRAQRNLYMSGFSLLMALIISRIDTLLARCAHLELAAEAAMKQAERAGKAAHTLLGEKGDVN

SEQ ID NO: 165905 - protein, 73 aa, Heterodera glycines
PSSSSLLLVLSLVRRRRFRQRWGTRRTQQPFWRSWKEKVKDEGKTEKVQRNKHLINCSNYYIYSILCILNKFL

SEQ ID NO: 165906 - protein, 206 aa, Heterodera glycines
  unsure (1)..(206): unsure at all Xaa locations
METENDATASPNRPLSAASVATSTALRDGGEADNSDAQQHQQATRELDEAVTLAAGRGARITDLDRQIETLMRCECLTEQEVKVLCAKAREILLQEGNVQRIDAPVTVCGDVHGQFHDLMELFRVGGQVPDTNYLFLGDFVDRGFYSVETFLLLLALKVRYPDRMMLIRGNHESRQITQVYGFYDECFRXYGSTVVWRCWTEVFDC

SEQ ID NO: 165907 - protein, 126 aa, Heterodera glycines
MVHRLRFGPFFSTTHTLTNVESLRPDSFLLNHSSAYWTAAICSWIEFWTRAWAFPTFCSLYISSIGVCCCIFGEFFRKLAMCHASVGFTHQIAVRRNKDHQLCTQGVYAFVRHPGYLGWMVWSVGT

SEQ ID NO: 165908 - protein, 191 aa, Heterodera glycines
MGKDAKKQMSTEDQIKSFMLDLVAGGVSGGISKTVVAPIERVKLILQTQDSNTQLAPEKRYKGIMDVFRRIPAEQGIASFWRGNLANIVRYFPTQALNFAFKDKYKQIFVRHNPKTDFWKFFAGNLASGGAAGATSLLFVYPLDFARTRLGADVGKGSARQYTGMVDCISKTYKQNGLKGVYGGFGVSVVG

SEQ ID NO: 165909 - protein, 47 aa, Heterodera glycines
MNSGGLWRFYTEDSNGLKKEPVPAMDMSQLIIASVTVLRIWEKYSQT

SEQ ID NO: 165910 - protein, 101 aa, Heterodera glycines
ILYNISIRRSFTRPNIARNTVLNLLKVFRRFVEIFRTLASHMVDVRRARRIVFHPIADSFTLCRTCRQRVPTHRTVIHRIDLALKLLSLLTRRADERRENE

SEQ ID NO: 165911 - protein, 116 aa, Heterodera glycines
  unsure (1)..(116): unsure at all Xaa locations
TQPASGISQLSYHIACVYSGMGPEARLLARKGRNIAMDYRALYGXGLPVPLLACRVVAALREYTRPGGDHTVGVALLIGGRDSDNGALVFRVHLAGAYHGRGITAIRNNHQLCKIV

SEQ ID NO: 165912 - protein, 150 aa, Heterodera glycines
MPPHHQHIHHHVPATQLQQQPVQPYLVHHLPQLQHHQQQHHHSVVVPTHAQHVQPHHPTPLAVPQPMRPSPPPLSMPGTGAAKHHYQCTKVRAHNTFGLKCRFRPDGLAVATTSADQTAKLWSCSSNTHKLLNTYSVPGNKWVWDCAFTN

SEQ ID NO: 165913 - protein, 210 aa, Heterodera glycines
IHYRDGVQKAIFDETPRRVPADFEDTNSVGGAAGELDTYDDVRLVEPQLEQPLFIPEIYRNDTREGTTKAPKGAKGGAAATNANRPLVSPEVQSRPPITVRTTTPRPSSATVRPPHPFGRPPPPLVLPQQPRLPPQHPQPPRPFPPPNAPLPQPFRQNSQPSPLPHSPNAVPRPMPNQQQQRPLTPNIGMGQIRTGVCHQAIFYTPQSVS

SEQ ID NO: 165914 - protein, 207 aa, Heterodera glycines
MKMSNNNDMSGYEKLGKIGEGTYGTFKARNKDTEQIVALKIVRLDDEDEGVPSSALREICLLRELRHANVVRLQNVVHTNKTLNLVFEFCDLDLRKFFDTLDGQIDQKVVRSLMHQLLSGLCYCHAHNVLHRDLKPQNLLINNTVKTAPQLKLADFGLARPFGIPVRCYSAEVVTLWYRPPDVLLGAKLYSTSIDMWSAGCIFAEIS

SEQ ID NO: 165915 - protein, 149 aa, Heterodera glycines
MSNRRGNDSINFDELHSLKVDNLPYDASVHELRRMFDRYGDIGDVYIPRDRYNNHNRGFGFVRFYSKRDADYAVSRVDGRMLSGRELRVSIAKYGRPIDEERDRGRFLFAIFSIQILIHYLFYNFVLSTKPERRVCLGLFPRGCFLAAA

SEQ ID NO: 165916 - protein, 185 aa, Heterodera glycines; identical to SEQ ID NO: 142225

SEQ ID NO: 165917 - protein, 143 aa, Heterodera glycines
LNETPQQLLETKHSFIHSSFIMARPRGSGRDPFKARSARARRRAGNKRKAAAGTAANVQAANRRPICLICLKKMTQVRQVRTICDHVFHYVCFHRWLKYRLFCPVCLLNFRTELYHSGNAVFEGAYNDGHVVLIPDGEQSNSG

SEQ ID NO: 165918 - protein, 177 aa, Heterodera glycines
MQETHIVLGIASVCSLLAIIATVVTLPSLYSEMSQMNSKVRDGVEAFRVNTDSAWTDLMDVQVVVTPPSKPRDNPFNSIFRAKRQLPGHCQCAGLQQPSCPPGPPGPSGPPGQPGQPGGAGQPGQPGQPGQPAPPGAPGQPGQPGNSGQPGQPGAPGQPGKDSGYCPCPPRSSVLAV

SEQ ID NO: 165919 - protein, 124 aa, Heterodera glycines
QETHIVLGIASVCSLLAIIATGVTLPSLYSEMSQMNSKVRDGIEAFRVNTDSDWTDLMDVQVVVTPPAKPRDNPFNSIFLAKRRLPGHCQSAGLQQTRWPPGPTRPRGPTGQPGQTGSAGQHPY

SEQ ID NO: 165920 - protein, 69 aa, Heterodera glycines
HKMHGAIRLNELILEHSRCSQLVLFSLPKPPFFEDEVDDYIQYLEVISDNLQKVLFVRGTGAEVITTSS

SEQ ID NO: 165921 - protein, 50 aa, Heterodera glycines
AETRAEFAERSVQKLQKEVDRLEDELLVEKERVRNLTAEIEQTVQEIQGS

SEQ ID NO: 165922 - protein, 30 aa, Heterodera glycines
TTGTSSFGKPHNKTHTLCPRCGRTSYHIQK

SEQ ID NO: 165923 - protein, 179 aa, Heterodera glycines
WEKLKFVFVLPSLMFLSVIYKNYSFSYDNSTLFSFAYLQNNSGELSSEECFGEKMVYTLKMNDSRIIRGKKFNCSLTWLLERYKLSDKYAIKEKIEVKYPGHPKFVFVTAANNNYFPYLRTFIANIKEIFGCQQKIIAYDLETVTKNKEWMNELDSVCNFEWRIFDFGQMVEGRVRHPK

SEQ ID NO: 165924 - protein, 182 aa, Heterodera glycines
MVRPISFSSFPPFLLLLFVAVFPLLLGAMTTDYHGFFGTRNAPLRHERRHFLPSAFVSSADEMSSSNSRHRYTGRVFIARDELRAARPSPQAEQISGQSLVDYVNRRQRLWRAELSPKFQSYDEAIKWRMMGVNHVRHSTKAKKVLGKTRFLDLDLPESFDARQRWNFCPSISLIRDQSSCG

SEQ ID NO: 165925 - protein, 96 aa, Heterodera glycines
WNNNKSSQRKCQVPAVPPPPPLRCPNFRFIPAMANCVAVEFAQCANSRRCSDYSRGWSVAWAWRWPFAWPPFCARWPSTDCSTTSPRHNGATHRHN

SEQ ID NO: 165926 - protein, 25 aa, Heterodera glycines
CSQSVKVVDIRQTLPADTQRPLPLS

SEQ ID NO: 165927 - protein, 98 aa, Heterodera glycines
  unsure (1)..(98): unsure at all Xaa locations
MEQQGTIDFWRPPPFVNSSGDVMVDVLRNGRHFLDFLRKFQVEFKVLVEDLXKLIEEKEIGPSPYAKLSKDGPILRDTFDRFEGVGPPMGDYHSFPQL

SEQ ID NO: 165928 - protein, 85 aa, Heterodera glycines
ELCNGLIKTKPVVIFSKEHCPFWVKANDAINSFKLRWGGLEIGELNHRNDCDQIQDFLKELTGTRSVPREFISGTFVWGGNKQSG

SEQ ID NO: 165929 - protein, 76 aa, Heterodera glycines
QDRLLPIANISRIMRRDLPTERKLSKHNTKCVQECITEFVLLITSQVSERCSLQKPKKIMDEHLLLAFRTLWYDKD

SEQ ID NO: 165930 - protein, 199 aa, Heterodera glycines
MDIPPFIFLLFLVPTLSVQLTIDDEEFGLNLQLIKHQPCPFKSDKSKWDRKLEFEAGNEQEGPKLVQRPNEPNCYSIGGKVTVFSEFKGEFSIYLELRSSANKKQVPEPCHNRKDDGCGGFGSCLYCDACQTLEENRGLKAQLLVDGKSISCGQELSPGTYENMELVFCLPNAEEMLKSQRLTKETFQSLIQTEDGTNL

SEQ ID NO: 165931 - protein, 209 aa, Heterodera glycines
  unsure (1)..(209): unsure at all Xaa locations
KKLSVIGSGLMGAGIAQVSAQANVKGALVDLIQSIVEKGKRGIEKTIXRVAKKQFEHPGKHNELVTQCLSNISLETDISQVVSCADLVIEAISDNLDVKRKLFAQVESALPQNGKMATNTSSLTLADIAVNLKRKDSFGGLHFFNPVPIMKLLEVVRFDGTSEETFNVLMDFGKTIGKTTVVCKDTPGFIVNRLLVPFMLEAMRMFDRG

SEQ ID NO: 165932 - protein, 91 aa, Heterodera glycines
LPDVCYSWWVLASLAIIKRLHWIDGESLTHFIIASQDDEKGGIADRPGDESDPFHTVFGLYGLSLLGHKGLEAVDPVFCMTKKSLVNFAFA

SEQ ID NO: 165933 - protein, 97 aa, Heterodera glycines
  unsure (1)..(97): unsure at all Xaa locations
RETHIVLSIASGCSLLAIIATVVTLPSLYSEMSQMNSKVHDGVDAFRVNTDSGCTDLKDQQVVVTPPXNSRDNPFNSIFRAQRQLPGYCRCDGLQQS

SEQ ID NO: 165934 - protein, 88 aa, Heterodera glycines
  unsure (1)..(88): unsure at all Xaa locations
SKPLRKTPTTNDNSKLLYCIDCNIIFSSSSSNDATTKKFNILNNGPIQSPTNPTEISAYVDKYVVGQQQAKXALPVGIDQHYQRLENN

SEQ ID NO: 165935 - protein, 117 aa, Heterodera glycines
MNAVKVPRCVGCKKGVVKPDIVFFGESLPSRFFSSSLVDFPKCGLLIVMGTSLVVHPFASLVDQVPSDTPRLLINLQPAGTDLLRYTEPDNIRSGFDQHNTGEKCQHFQNARLGAGV

SEQ ID NO: 165936 - protein, 211 aa, Heterodera glycines
  unsure (1)..(211): unsure at all Xaa locations
VLLVLKYVTAKDVFMRYHKTHLSRRLILELVADQEKEEMLVGKFREAGMPVDFVNKLFRMLQDIEVNKDLNLALRKSLEKGNCSXNDCVSVKILNAGAWSRSRDRSHLTLPRELEDLIPEVEDFYKKQHCGRKLNWAHHWSTGTVSFTSKAGRFDLEVTTHQMAILFCWNDRPNDKLSFATIRLATELSEGELARSLLTLVNFPKVRMRLI

SEQ ID NO: 165937 - protein, 168 aa, Heterodera glycines
  unsure (1)..(168): unsure at all Xaa locations
TTSDDTDSRGSCSSLLICFSYCSSIICFPCAIXLSIRVIHQYERAVIFRLGKVMREVAGPGLIFILPCIDDFRCIDMRTTSFDVPPQEFLSKDSVSVTVDELIYFRVDDANKAVFNVENATMATQLLRHTIFPNILATKTLSKLLNNRNQNHFEMQPVLERLTDVWGV

SEQ ID NO: 165938 - protein, 158 aa, Heterodera glycines
  unsure (1)..(158): unsure at all Xaa locations
NKIRLLHRDKLKPCMWLNKHIQSHYRPLELPWTLCXRSIFQWNNETVNVWSHLLGFVWFVYLQWWALNESLPSVNAPIADYWVMGTAMLCSQLCMLLSSAYHIFGCHSPQRRKQWLRADLFGVSAGLSGLYMTGLYTSFYHFPELQKFYGTLIGAMVV

SEQ ID NO: 165939 - protein, 68 aa, Heterodera glycines
KPKCRSVICPHRQMPPTSWPNAFVSTANERNERRIAPTQSSSTSSIILGRHRRVASSPAVSIISAGAS

SEQ ID NO: 165940 - protein, 91 aa, Heterodera glycines
ELVPAVFGAEEAAEARTETGRGEATETAERGRAPSPDAAQVQSDERFSAFFVDSAFAIDRTSSHYKGGNLADRQAKERQKRRLLKNNTDAD

SEQ ID NO: 165941 - protein, 127 aa, Heterodera glycines
FPWLLLIGMLYKKVDAASAEVVNSGLDFFSTPPTNCAVSNSSYREYLTLNPISSRPFHFKAIVWQCVTLISVCSDSSDHQLHRPQQSVCVHGIQAQENRRRRSVVDVPANAAVGLIQMPGATFIRNL

SEQ ID NO: 165942 - protein, 76 aa, Heterodera glycines
KSTPLYPMVYSLYAFSHSQLGMFPCKHLFLFFQIYNIKLFEFGDKGSGETERKNGFYTIILNLNCKIFLLRFVINR

SEQ ID NO: 165943 - protein, 133 aa, Heterodera glycines
KMEEGGLPPETAPGSATAEQQQQQQQATQPSGNEAPLDDGLAMLHELYQRRHAELLAQFQQSQSIAQQDYLLNLQLLQSALPAAAAMVVLQQQQIAVMPSAASQHRPLLGSLAHTSSEQSTEEFDVSAQQTAQ

SEQ ID NO: 165944 - protein, 81 aa, Heterodera glycines
NWWDPNPRPPPPKASTLNTPPLGRLTQAHLIPFSLSFFFGRNPDQKCLSSLFRALPGPGPKQPWYHSKAKSLLMCTNILKF

SEQ ID NO: 165945 - protein, 72 aa, Heterodera glycines
MPVGGKMREVISLHMGQAGVQIGNACWELYCLEHGILPDGRMPTDESVGVEDHSYNTFFSETPSGKHVPRSI

SEQ ID NO: 165946 - protein, 205 aa, Heterodera glycines
KVKKPSLVSAPAGTFSAADNHCSSDEGAPKAKSGRSCSSSTTSSASVPCFPKLDAQRSDKKVNSCSKNIGGDEKMLMGQQHLFAGGHSIKVDQDGVFFVGMTAAESGGSLANTEQQQQQNVCDFAPSGVVGDCAVPSFSAAVYAPMISAISDIYQQTMERGEAAHNNGIGTATRTRDDEQEHSPESGFSDESSSLMMMQGLLTTV

SEQ ID NO: 165947 - protein, 108 aa, Heterodera glycines
IHVLRTSCNQQRKELAREFKQLFGEDLSAKLKKALSGDFEELILALMEPPADDDAQQMHRAMPGLGTHESALIEIVVTHSSRQIDEMNRVYEQLYGHPLENDIVGDTS

SEQ ID NO: 165948 - protein, 188 aa, Heterodera glycines
LTMFDYDRHLNLAHQVAGNVDASNGQKKAITRTLTDDDDTLPFMGPLDSSPSEDDGKKTDDNAIVHGLEGLLRRCSSPNNGFHIGQFRQKSASVGSDHLYSMQFLSKRPPFHLLDTQRHKFASNGTSLDMQHTFRRLSGGSSGALADGYECDTSSGYGSPGALGTPLASPAMGSAQFHAAQLHKLFMD

SEQ ID NO: 165949 - protein, 179 aa, Heterodera glycines
QSILFGFCPLFRPPLELYHPGLVLFVIALPCHLFLAMIPVSVFFLTFDRICIIYYGPGYSDRLRKFILYAYQLLLLVCVVYNLLGFHAALPMPEKTCKRFSSASFFGMAFGLIYSHANECFFSVRDQWLHFGRGCPVLFGMACRLCPFQRVRRCNFLHNALPLQQTAVGPNGNYEQPLA

SEQ ID NO: 165950 - protein, 58 aa, Heterodera glycines
LLLSKFISKIFYFDGFLSNVRARDRILRHMPFFLRTSFDILSIKNAFSTWFEASTLTF

SEQ ID NO: 165951 - protein, 57 aa, Heterodera glycines
FCKVRQNVQINTLGFSIALKYAFKNICFLIKKLKFNILHLILKRIKKFFLKSINLKE

SEQ ID NO: 165952 - protein, 97 aa, Heterodera glycines
QMHIGALIIDHLPFRSDHFPPPLLNYASVIPFHCLLRLRKGIISAAVAQVTLKIGAIKHNANIVFSFDTRKKGTKNGTHAFRRSRFGAPVSAPARFS

SEQ ID NO: 165953 - protein, 99 aa, Heterodera glycines
LEEEHRLVNTVRSLIRIKNPNDRLCLARAVLLGLHDWRSRSPGGGGPTAFKSFANRQHTHGPEARNLLRRAAIPRNKHRYTIDDVQKGQDWIDQRYGPV

SEQ ID NO: 165954 - protein, 75 aa, Heterodera glycines
ALLISDHQQGEFLYFTYICRYFFLFRLHFKREIIKFTFWRYFQIGRLIFLKNQRGNRLVSKLPKLKKIDLCSSLD

SEQ ID NO: 165955 - protein, 198 aa, Heterodera glycines
VLPGKMRINGAISNTSAANSLLITDRMEMISHDLSLFLSRNGSTDSDQRAKADDDDQSVLIDAVNSHLRLVHSNHTMASLTAAKHFVEILGGRPLLQILAGNGSEEIELVKETKTVAELNTDIVPKELMRTENAGDSFGSGPFAIRTNVTHPIVLNWTHSPPNPSQLGSSVSASSPLPSSVAPALNLSSLSSASTPSR

SEQ ID NO: 165956 - protein, 115 aa, Heterodera glycines
KATFIKAALKKVASRIADTADQAHRDNAIVVVLFMCSTILILVQVETNLCSTMFQNVKIEVEVLRQIVFDPIGRVLAQTQKVVDAYEGNFAALLPLIKFLVRHANQFAALSENVG

SEQ ID NO: 165957 - protein, 207 aa, Heterodera glycines
KEESEEELSWYNLRSSSRQSSRSVGGGEKCAGLTLPTDGILSGNRIKPTISRFFNVVPSSAGVAVSAKPRDASARSNLLATSRANSNDSFAPGPSAILEDEVEADEQQKPTSSTDQSQSQSEDDAMASLPPSTSSTAQSVDFPPPSATSTPFLQRILAPICEFRDQSPDTAVDSVQSAFPFDVPLVANESASGGGIVRRIRPHSAVF

SEQ ID NO: 165958 - protein, 124 aa, Heterodera glycines
  unsure (1)..(124): unsure at all Xaa locations
AFFFGSGGGCSCPVCPPPPPQSNCGCCNTNGNGAGFSGGCGGGNGGXNGGANCGCNGCAGGSGGGGGSGACHGXAGGCGFAAPSFRCCGGNCRGPNCTTTGNGTTSGSRHCLGIKTRLPCARPG

SEQ ID NO: 165959 - protein, 96 aa, Heterodera glycines
MSGSINSNNSPIPLACGQETENMAGNGNELMRTEDNENSDDFLNLFENLELTTSEKLASLREIEKIFADTAPPPAGPTPIESSVLGFVFISHPILW

SEQ ID NO: 165960 - protein, 215 aa, Heterodera glycines
SPVPKCPVISGRKFFSSDAFNVDRNCTRHGGELVANVLKAHDVREVFTLCGGHISPILVACEQLGINIFDTRHEVNAVFAADAVSRLRQNIGVAAVTSGPGVTNTITALKNAQMAESPVILLSGAAPTLMKGRGALQDIDQLSIVKSMCKFTANVQNVGDIVPTLREAIAAARSDTPGPAFVELPLDVLQPYGKVLAETNFVVHADTAEKKAFND

SEQ ID NO: 165961 - protein, 183 aa, Heterodera glycines
MRLLLSLLLLFLSPFISLPLFVPFSLALPSPQKRCPSPLFRQSRSSPPPNGTSPHYSTPIHFFAITQDCQFVLARPDQLGQLPSLSVSLSVSDCAPSRINLLWSLNSPVPSLLLLQQRAHKLCLLPIEVPFSVIAHSTELFRYSLRNALRHFALCHSSNSSSLLTLNPNLAFADSLYSDILYF

SEQ ID NO: 165962 - protein, 137 aa, Heterodera glycines
  unsure (1)..(137): unsure at all Xaa locations
FFYEFSTFLQFFLSFIFCFSFFICQNFLIFFFDXIKIIVGIISFFVVLKXFYFFIQIFQKISKLLFSYFQIFFLIFLLFQTVSSIFGGYFDEFVMFLQFPFHSFSDFFFSFANKFLFFPFFLSPLFYCECQNVSSIS

SEQ ID NO: 165963 - protein, 189 aa, Heterodera glycines
MALMPTAETTTANLGTPTEQNQPQEQQQKAGTAAGTTTTAAATDAASAAVVMEEQTVPLKLRVPLTLSISISNVASASSIGPLSAISTTSSASGVPPSSAGPTKRRGTIEETDYLMGPLKSVHRRRADPRVSMGSVLMEILNELKNIAGSEHFTFPVNTKKVPDYLEVIKKPMDLQQIRKNVSENKYEL

SEQ ID NO: 165964 - protein, 217 aa, Heterodera glycines
KHFNNSPILNGILKNAEIIDHLSKKLQFDESEKALLSIVKRNVDRLHQLCNEWINTGHFSSIPDHYRLLYAFCCAVRAKLSYLLKDYFLSLRHCDDVLLKGNDLEDESLSKFASFLCRKFLPPPSEVPEHQTDSKKAPNLLPNSVQISSSELPSLEYFFNNFYKLQVPVIIRGMVNGRPAFEKWSFSYLNSICGHRLVPDELGSKYTDDDWRQQMMS

SEQ ID NO: 165965 - protein, 174 aa, Heterodera glycines
TRVGDSLAIQNLCLYDNLNLPLRENSLFASCQYGGPLAIGLPGASPNSWTIGIYMQNGAQIASIEASGVFRLFWTKCQKLIVVNQNGRVLLYNPLGVHLATFAMGNESLALGLAGAMAFSYVNETGLAVINEAKHIFAVNSVNSRVPWRIQNQQSEIVFINISGSSKKGSPSNR

SEQ ID NO: 165966 - protein, 83 aa, Heterodera glycines
SSRIKVILRPDVPPWHTSATALAMCEQLSTHIGPDAGAFGLHRKRRISSAPRHRGARILLSRLSGISIASHHWSIDQTHEPNT

SEQ ID NO: 165967 - protein, 103 aa, Heterodera glycines; identical to SEQ ID NO: 135492

SEQ ID NO: 165968 - protein, 198 aa, Heterodera glycines
MSRPTPSELTVEMLKKRISGGRMDLSSLRLNKVPIELMCRSLAGQRITCVDLSDNLLTSFSAQFLQFFPDIQELDLHSNKIKRLPENFGVLSSLRRLDLSENQIKKLPISFAELDNLRWLNLVNNPLENDLAEVIGSCSNDEECSFAAKSAVQYVQFFSTVSSESTAIADTAFLQNETSSTSNNSDNINVSALRQADN

SEQ ID NO: 165969 - protein, 194 aa, Heterodera glycines
IEKLCGKFAEPKCFYPTEACDNFTIFKQNAETTELNADNETKWIQLNDLPTGEGCLPINISIVSTLRNGYNCGVSNQLKDTADALARVLYLCLLFLFALVFHTLAQQPSEEYDLFGYLCAAYSVLVLGFSTVTTILESVNWTTLWECTNFRPYQSFLLFLLLPSVILFCSGIYETFSNCSLLKESDAENAQKQT

SEQ ID NO: 165970 - protein, 114 aa, Heterodera glycines
WLMLQSQHKFSPHLLRTLLLFFVPPPPPKKMVFTPEMTSRLLELVQARKDNLFPGSRHAEAGRIQKEAWSTVTETLNSEFPIDVPAGGLKVQQVQTRWKNLRQAGKEEAQKIKK

SEQ ID NO: 165971 - protein, 75 aa, Heterodera glycines
LPLQLSSSVAVSPSPLLIHFFFFFCLFFFPLIPLSALFFYLVSPSSNSALSSSLVSPFSLIASPFSLLILSLPSL

SEQ ID NO: 165972 - protein, 210 aa, Heterodera glycines
CLQRNAIQQSRFQQVREKGANNRQSRRSSTEAARLARPHKHTHSSIPTLPQQGGQRRAGRSSSSFKSAIGTHALSKAEKFNLLRNLLGGEARELVAGFRLEDNNYDTALQLLKDTYGAPDEHIRALHFELANLKPCKNLRDTKEFLLQLERLTRELNNSGEDIEGPPTFLMLEKKLTPGFLRTILTKKGEDPARWNTTKFRDVLNEAVRK

SEQ ID NO: 165973 - protein, 71 aa, Heterodera glycines
  unsure (1)..(71): unsure at all Xaa locations
ALFHFWQIERRPGNKVVTLVSNLASFGIDASALDSEIRGTGTSILATAPACEGPQLLVQGNXVYSRIVLCF

SEQ ID NO: 165974 - protein, 152 aa, Heterodera glycines
SSIWWILPKKNISISVEQYPFILSSLSSQTSMIECPFQVFHFKIDYLHPPGDLSVEKFPNLSPPENLTNNWFLFVLFKRFCFVSPRERLLMLIVSPREQYQKSKSLSSPPEIDKMPKSSKNLNRCRCYLVFCPGAPNSKTSRRSVLFAAYLP

SEQ ID NO: 165975 - protein, 169 aa, Heterodera glycines
MPNIKVFSGSSHSDLAQRICDRLQLEVAKAALKKFSNKETNVEIIESVRGEDVYIIQSGCGEINDHLMELLIMISACKIASACRVTAVIPCFPYARQDKKDKSRAPITAKLVANMLSISGADHIITMDLHASQIQGFFDIPVDNLYAEPAILKYIRETIPHWQESVIVS

SEQ ID NO: 165976 - protein, 203 aa, Heterodera glycines
KSTASPRHISQFQPKICPPPFAPCTPIRPVPTPPRQFFAAQLTAHFLRPTILRQFLALLSLLKSSSPFFSQLKCMPFFPDFHNPTQQNPLDELRRTNSGRTKKDSGSVRPRNRRRSPPSSRQKRRQRLAQRWTPFPTDSCAGTSRTRRDRCPFPTDSAFCSFLWRTMSREGGGYECGKRVDEKRKKRQNGGKADEKQLKTEKQ

SEQ ID NO: 165977 - protein, 151 aa, Heterodera glycines
ITAAATLASAFLASGASARFNLVRQNNTGVYWGQNAGYDTFGTGHQKDLYTTCRDRAIDVVDVSFVTNFRGKDGWPILNLSDQCWTFMTNKTTGLQMDVLECPTIGDHIKKCQALGKKVLLSLGGATYRSPGWATVAEARSAGNDIFAMFA

SEQ ID NO: 165978 - protein, 178 aa, Heterodera glycines
DILIKRGYAFVELDDPRDADDAVYDLNGRSMMGMRVVVEIAKSRPWRSGDSWSSRRRSRSRSRSRGKRSRSRSRSRDRKRRSRSRSLRRRSRSPKRSRSRSVASRSASPPEPKKARHTPSRSRSPDNKRLRSASPRRSRSITPNDRGSRRRSVAKERGSRSPKDRRGGSRSPARRTSR

SEQ ID NO: 165979 - protein, 172 aa, Heterodera glycines
MDSSKQYYMPSGSNFDKNKALGQVNVPHHSQMSQQQQQPNPATLLTQGQILNPQNIVVVSANTPALINTDLSALIDIAHKEYQAQNYAKAEQHCLALLQQNPHNISVLLLLSSIAFQQKSYERSMQFSNMAIRINPECAEAYSNLGNAHKERGELTEALKNYHMAVRLKPDF

SEQ ID NO: 165980 - protein, 157 aa, Heterodera glycines; identical to SEQ ID NO: 158264

SEQ ID NO: 165981 - protein, 214 aa, Heterodera glycines
IGTEVQILRSDGRVHAALVTAINERGVSVEWMEEGETKGKQLDIEVIVRNNPSLFPSRVHKPEKSCADPKTASNGVVSNKNRHSIAASSSMQTVVGRQIDCGPSVGYISKSPPPPPPLQPIAPVKDIKRICAGMSVKIERSNGRVQTALVTTIFPEKNGAAVEWQEQGETKGKEVDIEMLVRNNPEVFRTSPSSMHNKNFPFLAQVMNNVPLSM

SEQ ID NO: 165982 - protein, 36 aa, Heterodera glycines
FFFFFFLLEKFCRRLVDSNFRSATKPNTLPLWQLVS

SEQ ID NO: 165983 - protein, 205 aa, Heterodera glycines
SAIFERRPLKCQDLTDCQYVNVSVGAHRCLAIGFVDGSAPVLELLAPSVEERAQWVDILRMTLRRLNFLNTESFDNEQQRERTDNGPSQWPRAANEYVTLAGTANSDANSSTSSPPPQQTLPRANGRREVTQSPRVPMIQIPSTHLRTLSTETAQSSERSQTQLRKGLDDSLPPMRQHSEQQTNGERKGTRKTDGMTSGGESEEH

SEQ ID NO: 165984 - protein, 71 aa, Heterodera glycines
LWRNMILKIAMAVVFLVIVQFVPPPFSKFFYVFKSHKNTFYGVFGVADHESDAHLDQFLIPDPNSNKKSKI

SEQ ID NO: 165985 - protein, 42 aa, Heterodera glycines
RGISRGGDGPAAEGVATAEACLTEAEGRTEVRRRREKKQGTP

SEQ ID NO: 165986 - protein, 166 aa, Heterodera glycines
QICGISIAGPSVAQQNPFKRLQIDYIDHSVIAFLRSNHQIFDKSGTNLELWISCVRITDEQPIWDIFVREIWPIFPTNIRHLGFNGCDALDIFCRRTSPTILTDLNQLISIKSFGRLPEAIGDDFDVPNATISAGQALSKWLHSPRKDGQPKRLRCWQGNFGWINN

SEQ ID NO: 165987 - protein, 196 aa, Heterodera glycines
RLSPPPPTNSLSVPLFTSAGRQMILHLWSYTFVPLVFRPSQLNFLFPPFFFDIDFPSHFVFCLSSLVMDNLSDPSAVLPSSPSPGDSSVPSSPFDVAASSSFSTLIPGFNHSSHLQIVDVKVQKAADAAFTDFPAYITVLMSILIAVSFFLNLGCVGTILCRLAGQGKAFRCLLPFPSRKLRCSMLYLMFALLALL

SEQ ID NO: 165988 - protein, 200 aa, Heterodera glycines
MEHAVQLFALAKDIQSARLSLLSAGSSSSSNYIPAAFATSNSLSSTDESMNSTDDEALTTDESEEVSRMSTSDPIELQQNATSMDCSAEDANANESSAFSLPQTEANEITLERCQSFVKSASRIAIQYGTSLSYEFNANLKSIFDQIEPSDVRAVPPRVHPLCWYAIWRATDRFRALNGRFPGSIASSQKGDAKELKEIV

SEQ ID NO: 165989 - protein, 168 aa, Heterodera glycines
CHLLIIADRILDTIERDVMRKTTEARQALVRKQQVEPKKEELGEHEQVLFTSVDDGGGGSASTLPAQLIQTTTSAVGLNVPHSGQNVVQYVQIPAHGVQNGLILAESKFVPAESSDAQSHYALEHTSPQKFERGTSGSANSSNYYPVSIIQHEWPQRTSVVGSHHQLQ

SEQ ID NO: 165990 - protein, 135 aa, Heterodera glycines
MLKKLPKPCLIVYDDLMGDIEAKKLADLYTKKSHHNNFSVIFLTQNLFDKSMRVPRSNAQYIFLMRAPNDMLSIRNLASQMFPREQGFLMDAYRQTCALPYGYLLVTLHANNIIRLRTNIFPDDEERIIFAPKNG

SEQ ID NO: 165991 - protein, 212 aa, Heterodera glycines
MNSNSKASSPLGTAIALATAGGEVTIQSAIIAILYRKCAKLTQIIHNLQTENSNTSHSVRNELVLLRRTVLLLERRIAQSEANRTEMPKTEKDDGLGRHEMCEERKAIGRVASANSASEGEYADAVDDDPDFFKMSSKTNGTKVCSAVADSKFLEQIDRLHETGKHSEAYAELMKANREEPEVLWRLARVCHQMASSLELKDPRKRELLDEA

SEQ ID NO: 165992 - protein, 47 aa, Heterodera glycines
LLLIDQMFSLSATHSKIKNLKSIFNFIFIFGNLFLTPKIKLNFVGTV

SEQ ID NO: 165993 - protein, 107 aa, Heterodera glycines
MAKGAFAIAIWGKPFQNELFVNGPIEVPFEVYEDFLNSKGGVYYHVAGKLGGAHAVKLLGWGADNGIPYWLVANSWNTDWGEDGFFRILRGSDECAIEREAVGGVPD

SEQ ID NO: 165994 - protein, 134 aa, Heterodera glycines
GKCNVKKCIKAAIFGRPSPVELRENIHKNKFENEKKIKILETGMFPKKIRRTKLSLSFSSCLSFNKERRTYLNEEFNVGKCFVREGRNLCKVKPRIKNKMVKVGFSFRVFTPFQFSWEAKSPCSNCRSAIRTIR

SEQ ID NO: 165995 - protein, 58 aa, Heterodera glycines
FWTRSRKKSILSDQKMFRRFRYFDEFSYINASVDYHNAPISSDQMYSVISNISFLKMP

SEQ ID NO: 165996 - protein, 216 aa, Heterodera glycines
VKLDPTRPFLLSSPSNGIETEREGGVSKNPGDPAYGDVHFYSESVNLWKPSNFPVPRCSSEFGVQSMPLRGTMARWIGPSDWNYKSGTLVSRQHHPGGVLNLPAIVSQHFNLLSSNFSSLSLSAPFFIDKFAFLSQIHQAIALQAQIEHYRRFRSHLDEAGLGHTMCAMYWQLNDVWAAPTWSTVDFDLRWKVGHHFVRRSFSPLIVSMFLDSNGI

SEQ ID NO: 165997 - protein, 102 aa, Heterodera glycines
MVTWVPLLCKGKKLRVVYDASAHTRGTNSLNDCLYRGPVLLPDLIGMLLRFRCPTFPLLADIQAAFLQISLEPEDREVTKFLWLKDTEKPLSSENLIIYRFC

SEQ ID NO: 165998 - protein, 162 aa, Heterodera glycines
ILVNSRRNFQKTNLTPQNFTISSVFHFTNSPPPCTFNLPSPWLPFMCMLFIVAVSVSCCNTTTSTLCCSPYCGCHCSPATASFSRHFQLPMLSLLLLLCCYDNDYDGDCCKNGHHQTVAAFPAGTASAAVHDDFGAPPLFLFLLQLLRMFAIVYCGPFQCPT

SEQ ID NO: 165999 - protein, 122 aa, Heterodera glycines
IYGPRRWRHGIGRNWRQSEEGENIGREQSQHTAQPPTIKPICSKMPKKSPKFEIAREWHRRAKAPGRYASYVRPHLFLLRRAVFRASAPRCRFRAASAHVGTAGGEQTLLLLSAGRRERRRG

SEQ ID NO: 166000 - protein, 103 aa, Heterodera glycines
TTESIEWTEQREQLLGNLLAELLTFSDCEFRLRECAFGEFGRPKEKSERNLILTTLATSLLCEQRASEEFVRFTLFLSNCAFLFSLFRFVGPSLFWIAKFILC

SEQ ID NO: 166001 - protein, 155 aa, Heterodera glycines
RHLSFLDDNLYDSQTLRRSTRLFRHFHALPPSGVPVNGLGGATPSGLEMAKRLARHVWPKGQWRVKGRVLFAFSLLIAAKLLNATVPFVLRDIVDFFNGKLPAELSLGFALPGEAILSAGIALIIAYGAARGGTSLFNELRNAVFARVAQRSIPR

SEQ ID NO: 166002 - protein, 81 aa, Heterodera glycines
SSLIHKEVGELSRKLSSQKNELPKSGERLSKKWCQCGRSEIEKMKPMALINFEDKKPIELLYQKKRLGKGSWSEVGKMLKE

SEQ ID NO: 166003 - protein, 111 aa, Heterodera glycines
PPLWIDRPGAWLSLSANTGQGLRRDWEAYVDSHTRTDRPSGCRHWRGIEKIEKVWWRHETTPTKDRLSSGVRLKLSKSNEGQYHSVCEAVARTRTNSNYQFLFSKRFRKFL

SEQ ID NO: 166004 - protein, 147 aa, Heterodera glycines
  unsure (1)..(147): unsure at all Xaa locations
DRRGKREREEGEIGTEREERERERGEKEREGRRRERARESEERERXREKEREGRRREREREREEGEIGGNEREERERERREKEREGRRREREREREEGEIGGNEREEREREGRRRERGERGEGEKEREREGRRRERGEGEKERERGD

SEQ ID NO: 166005 - protein, 212 aa, Heterodera glycines
MVTVTRRKSFACSSIDIDNVIGRLTNPTVQANVQWRHGVDVSESEVRALCMLSRDLLLSQPTMLELSAPLKIVGDIHGQFSDLLRLFHACGFPPKSNYLFLGDYVDRGPRSLETIILLLCYKIKYPVNFFLLRGNHEVASLNRIYGFYNECKTRMNIRVWKAFQDVFNCLPVAALINGKIFCCHGGLSPHLRTLEQLKRIQRPAEVQESGLL

SEQ ID NO: 166006 - protein, 144 aa, Heterodera glycines; identical to SEQ ID NO: 152974

SEQ ID NO: 166007 - protein, 51 aa, Heterodera glycines; identical to SEQ ID NO: 138349

SEQ ID NO: 166008 - protein, 191 aa, Heterodera glycines
  unsure (1)..(191): unsure at all Xaa locations
GHVTDLLLLDVTPLPLGIETLGGVLTKLITRNTTIPTKKSQGFSTAADGQTQVEIKGFQGERDMGLDNKMLGHVSLAGIPPAPQGGPQIEVAFDIDAKGIVNVSARDRGTGXQQHIIIQSTGGLIIDQIENMVREAVRPAAADAXKNDTIEVINHAESVLHDTESKITEYTEHLNADKFIVVKEKLEELKK

SEQ ID NO: 166009 - protein, 73 aa, Heterodera glycines
FAWKNTVLHTYHTSIIFFRLFFSFITQRSRRIRSSPNFAGKLLRTLQMLINFLRIFCLEEHSSSHLPHQYYFF

SEQ ID NO: 166010 - protein, 103 aa, Heterodera glycines
LGTPTIVDNVRFDPRLSVNFLHKSIEEKRKDEIIHLLCTISNQQREELAREFKQLFGEHVSAKLKKALSGDFEELILGLLEPPAVIDELQRHRAMSGLGTLEG

SEQ ID NO: 166011 - protein, 211 aa, Heterodera glycines
LSTDSTFHTNASFSSALRNPLTGFYRPSRFDANVSNFSNKNHPFDEGLNFFGKLTSSQFDNNNSYEPSLNSNRFRFREFFAREHEQQEQDRFLKNLDNSRRNDSIRYDPYSSASKNHRLRKILYKSVANIDDLSPLPNKYVGFTMHDKLAHLKKTIRGFDTTNFSNKENSNFTTPAVSSLGFRNLDSTGYGTALAKRFSPPNTSTPLATNQ

SEQ ID NO: 166012 - protein, 39 aa, Heterodera glycines
TTAFSSSPGARFFLLRTATTGKLLLRPSPLPGHRKPRSS

SEQ ID NO: 166013 - protein, 66 aa, Heterodera glycines
LVIFTKPLSNINFDYIFKKKNSTAPSGTMQKQLMDFANIVPMLRFGGEKFGQKITCNYDILCLVNL

SEQ ID NO: 166014 - protein, 213 aa, Heterodera glycines
QYLRRKWQGDPNILIDRFDVRGYLDTISETAPNALAKKNIPKDDVIELQCDYERYRILVFNEFRKVSEKQFLNEIAAKEFWPAQQQANQSANAAYRREIEKKRKLASKRAAIAFNYADSTETAATGQSNATRENNCTSSSSSDEEDFDEMEEIDSVLDTNALSAEQAATLNKIGAHFNITSGAFLQLLSLDRKEQTSTAQIREIDKAKLALSG

SEQ ID NO: 166015 - protein, 212 aa, Heterodera glycines
MVHKPFSLCLSVFFISAFFFVYSADESIKPPTRNVLITAEEEKQRDVEGFLAIKAIHAVLDDDNSGSIDRFESADFLKEDLKFGGSDKIRRENAFHSNDEAITVDDLWENWFQSEERGWTNKQVVEWLTNQVKLPQYANGFLSAEVTGLDLPKMAVQNSSFLSTKIGIKNYVHRQKLQLKALDLVLFGFQDTSSIAKDIALAGLLGLLVAVL

SEQ ID NO: 166016 - protein, 85 aa, Heterodera glycines
YSFFVFPFRIDDNSSLFENIIHSLLHFGDFDCLFGASDFSIVSNTRVPVSSASLPNTVPADFNFGRIVLHNNLRISPTPPPRCLP

SEQ ID NO: 166017 - protein, 148 aa, Heterodera glycines
  unsure (1)..(148): unsure at all Xaa locations
RGGNREREEEEAKGKRAMEENDSERGTERGRKSRRIYRLMKEEERERERKXRVRERQRGRERERERERGKRERESKRNMIEREESEFSNLLASSSSYLKNIILISFSTGQRLNWLKRNCRNRNASFQFKMALVFGFLKKIFVFLCYCR

SEQ ID NO: 166018 - protein, 136 aa, Heterodera glycines
MAPQKANGTDMAKPRGYVQQQQPKQAERDEQKPSICSMCQSADPSPAHRASLLVQCSACQHQMHSSCIDMPLNMVEVIRKYDWLCIECKRCSVCEQPDQEAAMMCCDACDRGYHTFCIGLEMPPNGTWHCPKCKGC

SEQ ID NO: 166019 - protein, 119 aa, Heterodera glycines
AENVPNSQPRTPITESFYDQCNSFESIFARKFNLVDCSYKDSVSEFTKKKKKFEFKTDPPNAPRAANFEINHLGPLISKSPPYVAMDLIFVFEIVKTFPSFEQLIINDKVPFYSEHMQN

SEQ ID NO: 166020 - protein, 118 aa, Heterodera glycines; identical to SEQ ID NO: 132975

SEQ ID NO: 166021 - protein, 74 aa, Heterodera glycines
TLITIASYQKFNLVYNEKSHYQLRRTGRFPSIHRSFYSSVFLLSSPTSSFFPHFPLIFPSKIDPPPHKLFSDAH

SEQ ID NO: 166022 - protein, 200 aa, Heterodera glycines
MPASHSNKEGAHNQSSEGARRHLQLPSPPPDDFQVSRRAVLLSSDEEDEDSDESPSKPSSSAAAPRENRGRAILLSEEEEEPQGEETEWLGKKSAASAGPSNTERKREKKKPEAHGMLKSLKLKAKKLREKQKKRRRKDRMRSDEEEGEAMDSDGSNDGDVDMRADSYDSEDSDANEQISARQLKLMRELEQKCVEFLNE

SEQ ID NO: 166023 - protein, 211 aa, Heterodera glycines
  unsure (1)..(211): unsure at all Xaa locations
VYLKTLAVMSQQQFAERKVMPKREYQKELTMVPSWMISTSTTTTAAASSSTSAASGQSSPGPDSHLPPFHQHGDVGFCELPLEVEGTSKLGSALLKHTATRSYSSNPREFFKFGRKPTIAKSRGGIEQQQTDAVTGGAVGASVGDSAAGPSGSSGGVSQLRYRKSGGSGMXSGAVWRRFKGRGEQAQIAGRGRRSQCCRCGHNSAQGQPRG

SEQ ID NO: 166024 - protein, 208 aa, Heterodera glycines
  unsure (1)..(208): unsure at all Xaa locations
TGTQPTNIPINGTQTTSISIANTSTGLNPPAFQSPTLQRDSIHQHFNHWDSTHQHSNYWDSILLHSNHWDSILLHFYHWDSTHQHSNQRDSIHQHFNRQHFNGTQSTSISITGTQSTSIPITGTQFSCISITGTQPTSIPINGTQSTSISITGTQHTSISITGNQFSRTSITGTLLYSPAFQSLGLXFYAFKSLGLILLHFNHWDSTL

SEQ ID NO: 166025 - protein, 66 aa, Heterodera glycines
ICRTEVERKAKKAKSGGAEENGGREKEKKRKKEKKKKKKDREKRTEDEGTKRSGGETKRETVMPFF

SEQ ID NO: 166026 - protein, 99 aa, Heterodera glycines
EIQATEFFRPIDWDRLYRKENEPPFKPQLNSDSDTSYFDAEFTREAVQLTPPAARTGPLDTLDEMDEIQNNFVQFSFHQEQELGGVPDSLRENSELMEE

SEQ ID NO: 166027 - protein, 111 aa, Heterodera glycines
WGPPQAQTKTKTAPAKSLRFLFTDFCSAQYLVLMRAPNSALAIRNIGVQLFPGKLDYFLSAYRIATNKPYGYLVVDMHAASNPLLRLRSGIFKDDEEEGKKIIFIPKNGLL

SEQ ID NO: 166028 - protein, 121 aa, Heterodera glycines
EVLEPIHQFVVQFLSCEICSKNFDKMAREDGILSVHRPEDVILWLWRGHNKVNKRLKGEASEDPHFPKQQFPPSKLCSECRTQNGDFDEQKVLRFLLKYYSEVRTDHYKVSYSQLGFFSFR

SEQ ID NO: 166029 - protein, 108 aa, Heterodera glycines
RKQQEKKRRKMPKKGQILKNELIGEITALICSTVADHWSTAKFSMLSLRKIFGMSRKQPFGYRLAIRRIGTVVGRKFKQNSVIEIDNARMNNQSLSIDENRWISTLSE

SEQ ID NO: 166030 - protein, 150 aa, Heterodera glycines
MDQPMLSSQLFTQKIPCSYKGCQKTFVKQSAMRKHLQIHGPRQHICQQCSRSFIERSKLKRHLLVHSGEKRFVCDFEDCGKRFSLDFNFRTHIRTVHTGERPFQCPFCHKQFAQSANLRIHRRFHNCRPTVDGGKEKQKNGANRQKVTSC

SEQ ID NO: 166031 - protein, 122 aa, Heterodera glycines
IKLNLRNLSPPPPNSLFSILSIFVLFPTHFCYIKRPAAICGCPNNNTMENEETKVIPSHPLMCAKRVRADEGQIWRKNFLKGVANRLPVRQNAKFRGGGGKKLKIYPPRGTLKIGKLKNWIC

SEQ ID NO: 166032 - protein, 171 aa, Heterodera glycines
MAPHKTSSFEAPTQSELKQMLDEAEYGFVMADKIGTSLLEQNRELQEKNEFLEASLATSRDNVAQLKRQLEQRCDLFKKLQLQLEGMEEEEPNGTDQYHQTGMCSSTAAQLESKIKRLEGENKELRTKTKDSDELRVIAEKREEQRINEYCSRLRGANLKIGQLEVQLAEK

SEQ ID NO: 166033 - protein, 85 aa, Heterodera glycines
HHLPTILLSFSKEWEENKQPVSVDKTIKYFDGQLENADEIAQIEGNGPKKRPNMNLNDFTFKLGNWCFDTPGTVNSEQVDNHNLL

SEQ ID NO: 166034 - protein, 205 aa, Heterodera glycines
  unsure (1)..(205): unsure at all Xaa locations
GVLAMAAKFISNQRGGHKLIYEGHSYIKHRHRSTPVGEVTYWRCDQLHRLKCPGFAQTNSRSDEVVVTRSHSHAPSSTRIEVLIAKSDIRRAAVNAISATPGAIVANALEGISDAAKHQLPKIANLKKTATRQRKGIGDGAAENPLPSRETLRKRLVQNYRNGSHRRTTXTVPMPQTSHYVASADPALSIKQSQRAEEGQCQMAT

SEQ ID NO: 166035 - protein, 203 aa, Heterodera glycines
MAPPVKKKKKFSSDNHRLISSTEIGEHEQQSMGSLTTSFGKRQSLFRHAKKMNNRILRKIWICTDIWMDTFPFFDHAQLGLKLALISPRFDVLVDKHFNCQSELTIWREITIVKDTGSELNLTVLIGGKSVQFPLPDRSLPNKIRFDNLNIDYIDHSVLVFLRANKQIWDKGTNLSLYVCWSHNQNDNNNNFLPIWDVFVCKI

SEQ ID NO: 166036 - protein, 108 aa, Heterodera glycines
LGQLSNVKLASHRKCDEIGESPTVRFAIKNSVLKFLSEFPNSAHLRNNSEFCRTFGSPIFVLNLNIISNDYLNFTFFWSGTTKKKAQTFDGTSHNRKYLNGYFPWKSP

SEQ ID NO: 166037 - protein, 211 aa, Heterodera glycines
AQLASFHAHWSAVGCHLLTNGFVNPIPIADRQKGGDEADAKRAEAGDGFGDGDLAPNATDVSSQVENMEQIEGLKNDGNDQQQQQQMNDEQNNADADQQQQQQQQKMDETDQPIDVEDDFAGCLEALDAGEDDEQGIDGEDNDDDQQQREDIDDRADWNFGEVEEPEETQLDPKLWEDEQKVEEEQKVEEKVEEKVEEEQKVEEEQKAEEK

SEQ ID NO: 166038 - protein, 73 aa, Heterodera glycines
PFQSGRCMEKLFSDKLGGLFRFSPAILFVSKVIKKNIFLLLLFHHFILFIVLANARKNGAHWDGRSSVHGERR

SEQ ID NO: 166039 - protein, 196 aa, Heterodera glycines
MATAATQSATMDPAKLTPFKQTPGVSASLRQISADAFYVVNEVVIKRLGPIPILKGDFHLLPFKVQRFVAEKAELCRPRGIFICDGSEHEAEEMTDLLVERGVLTPLVAYENNYLCRTDPRDCARVESKTWMVTREKYETVTHTPAGVEPIMGHWMPPAQFADELDTRFPGCMAGRIMYVIPFSMGPLGSPLSKIG

SEQ ID NO: 166040 - protein, 210 aa, Heterodera glycines
  unsure (1)..(210): unsure at all Xaa locations
QQSLQLDNAPARAATILFGLGFKPDDQRXPTPEFSGGWRMRVALARALFIKPDLLLLDQPTNMMDMRAVYWIENHLHEWHGTILTDAHDRKFLNTVCTDIVHLHSRRLDAHNENYDDFDNAMREKLTLQQREYEAQQQLRQHIQEFIDEFRYNAKRASMVQARIKMLEKLPVLQPVEFDSDVVVHFKDCDKLCNPVLHLDQVAFRYSKET

SEQ ID NO: 166041 - protein, 202 aa, Heterodera glycines
MVSVQNAAQPPKGRLGFGIDRGGTFTDVFVAYPDGRTGTFKLLSVDRQNYSDAPTEAIRRVLSDFIGIELTRGEPIPTDHIAWIRMGTTVATNALLERKGEPMALLVTKGFKDLLHIGNQSRPNIFEFDIRIPETLYEEVEEVDERVLLEDDTCEMEIQGRKVRAQNGQMVIVEKELDQEQIRAVLGQILARGIHSLAVLLL

SEQ ID NO: 166042 - protein, 104 aa, Heterodera glycines
MSTRRSSRRSSAAKGSREGSVAGKSKPSETAISDSKKPSNSSPEKAQETGKMEEEKKLEPVTETEPELSTEDEEKSIVDEKKTTPEKKQEEVGARGGATAGNLR

SEQ ID NO: 166043 - protein, 201 aa, Heterodera glycines
RTPEQSRDVFWDNDHIAPLYSMEAAQRTVHPLIGSASKINMAKGKKTITMAPHKSKLSKMDERTRLAHIRLVDTMEHNVKHAEELKADNANNENKALGELRKRQKSGKIRDGRHMEGMPSTRRAPDLERDGFHRLRESRDGEHSPSHHRPNGTSLTSPHRTRRGSPFGAGALRQPDPLSQGHYIGEEMPQRDLNPYMGHIQ

SEQ ID NO: 166044 - protein, 37 aa, Heterodera glycines
LYHLCFLRLRIRKLNLKILKYVLTFSNFPYYFLKNSL

SEQ ID NO: 166045 - protein, 169 aa, Heterodera glycines
WQFLLINTISFFFFRLDLNIVGVANAFGLLRMPQIRELRNRADISSAFKPRMDVRTSEIKFKDEKLEAKRMVMLEQRVKQRNEEREKQRAGRENWGDKQRPAREYGRDKQRTAGENWGDKQKRPAREYGRDKQRPARENWGDKKRPSGEYGRDRQRNGGIRSNNYNSRG

SEQ ID NO: 166046 - protein, 51 aa, Heterodera glycines
AISFLPTRRWVLPSLHSGVIQLWDYRLCVLMTKFDEHDGPVRGCDFHSQQP

SEQ ID NO: 166047 - protein, 113 aa, Heterodera glycines
GCAWHGCKKCYPSDNMLLPNGKSAGEVRERDAKRLEFIRSQVAHVDVYWECEIQCMLSRSKEMRQKFAEYVDDGPLLIRDAFMGGRTGPLTLYHEARDGEKISYFDFTSLYPY

SEQ ID NO: 166048 - protein, 185 aa, Heterodera glycines
STELLAKVRVSLRAKDLLDALMASEDVNRSLGEENRSLWRPEFAAYMVEGTPGTPYGGLMSCFNIVEYNMRLRYDDVSALLRPNESLLSISFPALGAPDFTDPPAVPRPTHPDSVGRSVFYPDEAIYSGHPRFRNLVRNIRGRRGEKVAINVPIFRDQNTPSPFTETFENAEASRAALPDHIYMD

SEQ ID NO: 166049 - protein, 193 aa, Heterodera glycines
QVIFCGICQFGICSNDFPFCFGAVSALLLKRRGFDVVGVHMTNWDPQDEASDSSSCPQSEDLTDSEKLCAFLGIKLHIVNFVKQYWNDVFINFVDNCSFGRTIVPDVGCNKKIKFNLLRKVAFEELGADALATGHFARTSQGDFLENHLAVPNKIKLLRAKDALKDQTYFLSSLCHSQLDRVMFPVGSLYKSE

SEQ ID NO: 166050 - protein, 214 aa, Heterodera glycines
FRRSLFSNDTLYDFLRCVDTATLGLSVALCCRRFANFADFILRRRAHSNCALMLFDGQNQMLCAKSKAQSSDSVFAVRLWDSAKANIRGRGFERRIYANGMTLYKVIDQWFCNPIEQKALELSEFEVPEWITGIRFLYLLDVVSLPVLSFLRQISPMLEKCCIKFELTSFWSKLHSSGQLLPFLSLFNPLTFSLHLTFDDLYFHSVNRPNPYFF

SEQ ID NO: 166051 - protein, 192 aa, Heterodera glycines
QNCPLLLLKMAPKCLPPELLYEFVLFIPVEDAIPNVLSSCCLLYNILRPRVIKWEKKMQKLIDEFGKFRRDFDGFRGEFDGFRGEVRTELSTMKNRFEVLDKPFGQLPVSPQTLEHNWAQFIDYLVQANNGVTGRMATLTNAVERLNAGDSDEADKLYGDVTALDSDCTDLAEMVHRIAQLPNVAQATQLAT

SEQ ID NO: 166052 - protein, 85 aa, Heterodera glycines
SMTFHFSLVFNVRLFKRTELSRPENKATYCVTSECGKATHTPWTHLSGICGTFPFPSPFRNPIPNASTTTAPGRATLPSSDLLSQ

SEQ ID NO: 166053 - protein, 90 aa, Heterodera glycines
MTGLRGTKPPRAVPVSAFLGNTRRHRLGARCSNHVEFDVRTKWPSCADIVNKVQDQTTCASCWAVATASAFTDRYCIEYAKHGKVGNYFI

SEQ ID NO: 166054 - protein, 201 aa, Heterodera glycines
AFGGSNIEPSVRSCFEHTKFPPTINVEQFLDWLRKEPQSLVWLPVMHRLGSSEFAKHQAKCNACKMFPIVGLRYRCLRCFNFDICQNCFFSQRTAKSHKLSHPMQEYCTPTSAGDDMRDFTVIIKNKVRQGKSRIGYLPVEQINEGPPLECNDQTPQNAETEAMHQRMQLIAARLDKRQTEAAEAFPNAIVPSEEGKVKNG

SEQ ID NO: 166055 - protein, 60 aa, Heterodera glycines
PMIMIVNFVIFSPYFAILSILIHILTFLVHIFGVFLVYIISFTKRRSGMPKIKIISLAFC

SEQ ID NO: 166056 - protein, 199 aa, Heterodera glycines
  unsure (1)..(199): unsure at all Xaa locations
LEVKVEDKVRNERAMSFIKVNVRAVPEIAFERHATIRLLVDSALSPVSDLLDEEAKGLASALVREEHGEPSRLELFRREMESLTQAFVEVISLKPDEQLLQRLSTKVVDLRFTARNGDEFLDPTHLHGLAMRNRERLATVLRARILAVGVDMCKWTTCDNGCRTENRADNXGVVVQANRTVIVGLNASAADVCECPAYS

SEQ ID NO: 166057 - protein, 80 aa, Heterodera glycines
SCYENFAFALLFDEKKYILFYPAIRSMFSDEDEEEDEDVSEVGMITAEDDDDEAQHIRVRTQQQQVQPEDEDFMRDFDRL

SEQ ID NO: 166058 - protein, 86 aa, Heterodera glycines
MGGKKRPTMSAMLTTPFFRTLIMHKLIVHFWHSHSLWPMCGANPKRKSLKTEEEQKTNGLNAKWLLRACPSHKVGKCCASCCCNTI

SEQ ID NO: 166059 - protein, 112 aa, Heterodera glycines
KGNWNWTNGEKTKNWKFQMTIQSENYCNECMKDMPVSIFKCAFSFIAFSVRLQSTRGGDDDEAFHSVQNEANTMMEDLQGKFKNIDGVFEKLGQIERMLAQLVGSRQTEGGN

SEQ ID NO: 166060 - protein, 91 aa, Heterodera glycines
SQQLYWAHHHQQAHRETGPSELLEFRFRSERIVGEMSRAICPNDQHYENPSGKCLTRKDAKFLGPKHQFVDQLKFKSATDDRDGLSWYWAK

SEQ ID NO: 166061 - protein, 203 aa, Heterodera glycines
MDLTHLTTEEEALFQLHERRCTWLYVVNDTLTALQGKTPYLYRHEMLQLFQQELITQKLAKSLDKLPQKLKPKALMSTLRMPETRDCYQCNVERSINDENLYLCCAVPHAVLLFQWYEPLSRFVHLKRVQLDKLSSPYTDLQHPHKPFNLVFRSGAANSDLPMVCIGISRALTSPVGTAQELLRELRTNLQKDKFELQLVDFN

SEQ ID NO: 166062 - protein, 113 aa, Heterodera glycines
QMSDFALFSPATVLIAFYFSVVPNSPRFVLDISSAQKKGEELGNLSNFAHLHFFCFGWEWGAEDAHLSRVIIAAPLIGQFKQMMHVPLGGRTNKAIKREINGKRRGRGDHTAE

SEQ ID NO: 166063 - protein, 102 aa, Heterodera glycines
GGYSWARPVFILIGERLSSLATVSHAGLPAPWLRCKILAYRNLEWVLGTDIFGLEMAVDFTGTSASICTMDALEGKPVPKNHLDFLLGNQQFRRCKLAIFGH

SEQ ID NO: 166064 - protein, 196 aa, Heterodera glycines
MVFSIFRLYSLSFLLFLPLCPTSAFYKYDSSFAFLNVRSKSLPTGGSDFCVNFQQWHSRQLPSSADTKNFVQIGWWNSNLNTNICLENGHNFAKNELVPVDYRTLSSELLPCKFKEGEAVVNATLNRLKPKGVRNVLFLMEKGKRNRYGIRDFLFSQFYNAEINDSDTSMSVFFVYNDTFRQEIEPLLLNSSSTEL

SEQ ID NO: 166065 - protein, 85 aa, Heterodera glycines
LGESSKLGERGCCRTPIPILNHFLIRFLHRANMEAGRYIIRQSNVDEWRANVRILSPEGDGRAPTMLSDNWSLRAVQNGQGNVAA

SEQ ID NO: 166066 - protein, 97 aa, Heterodera glycines
ILNSKKFPNFFSAERDGLMLNMQRILARCNTVNISIETPRDQHQFKALEQVNKVGGAIVGATLFQAVQPAGIYASFESPGRVGICANAIKNISEIGI

SEQ ID NO: 166067 - protein, 131 aa, Heterodera glycines
ILSKNSFVEENVGRIGSVSLTVTNRLFRAIYFKIKSTSNSFYSICPENGIIQPKENVEVIIKPNDDSLANLQEITTKKHKFLIMSAIVSNLAVQAENFWKGKKHFSEGVYSKKLKTKVQKTHHNQQNSEQR

SEQ ID NO: 166068 - protein, 55 aa, Heterodera glycines
ISCLDFSPDPQQQRLCAGHSSGALTVFDCGRGRVLFSGRDIIQPGRSVLHVKYIA

SEQ ID NO: 166069 - protein, 148 aa, Heterodera glycines
  unsure (1)..(148): unsure at all Xaa locations
LALVCLXDSASPVAIQLLLPSLPLPIPPPFCAPPPVPASPPHPLLRPRLPSTPPPPTWSRGRAADPRVAFFCCFFFFVLLVVAFCVISLGACASGPXAXIKKFIIHRFRGYSFGSFRSFARLRREIRCCRGLSCAVFSSPPMCQFGGF

SEQ ID NO: 166070 - protein, 203 aa, Heterodera glycines
MFTTRKVCSHTHTAFEVIPSPLLPLSPPNPLNRQQRVRIQLGADESPQKAKLDSQPLLLDSPSSSSAGAVLSNCPRRNHSYLSLFNLAHPQHFVGEHGFLSWSSLRKKANTETTENGDFALYDNEPAHNFIAPYISGYTTPGPMEREASKHKKAKLGVMLGVYLPTIQHILGVTMFIRLAWIVGVAGVSHTFLMLFICWLCTF

SEQ ID NO: 166071 - protein, 83 aa, Heterodera glycines
KFTLPMGGEGRTDYFGNKKIFWAKSVVKSAICKGMDSFRAIENEWCFMKRAVKEWMDGNSLYILGVKIARLGNFEIPNFFAAS

SEQ ID NO: 166072 - protein, 166 aa, Heterodera glycines
MAKSPKKSPTKRHVSVPSHNQSLTKRPKVEFAAILNKTNGTADKQPMSFEHRLAKLDGDDGGLHRASTSSGHISARQPGAEAKWPRPAPAKWVREGRTDANLAFQLIDIDFYMGPTFHSNDWWVNPRQKKADGTYTLAVPLIQTSKSIAFLSSLAELVGLHLAEQS

SEQ ID NO: 166073 - protein, 56 aa, Heterodera glycines; identical to SEQ ID NO: 141389

SEQ ID NO: 166074 - protein, 81 aa, Heterodera glycines
EVSANFLHKAIEDFRPDESVHLLCTISNQQRQELVREFKQLFGEDLSAKLKKALSGDFEELILALVEPAAVYDEQKMRRAM

SEQ ID NO: 166075 - protein, 157 aa, Heterodera glycines
QAFQGELFGRKFELSPNAIRLRIVTAIRECSGVNLGVTIPSEDIVRCIMKVSHSNDYKARSMTLLFFASLGRLIFDDKKVHIFVIESLDCADQTEFSAAIRAGNELAKHSVPFSVLDMNKIAELVGSNSLTHWVRAELMAVVGNLRDLSLTRQCLEL

SEQ ID NO: 166076 - protein, 94 aa, Heterodera glycines
YENHFTNNKCPFIHKIKSYWKKKKKIIQHFENILKKMKLFPLLFCLILIFIALINQIKSAKKKLEQKSFDEIFGEKWEEKEEEQRIDEKERTKI

SEQ ID NO: 166077 - protein, 124 aa, Heterodera glycines
IHPIMNAKIIRVPKIACDLRLEKNGVSKNRNYAQKASQPILAHPIPSTIAFIHPIMNAKIIRVPKIACDLSLEKNGVSKNRNFAQKASQTILAHPIPSTIAFMHPIMNAKIIRVPKIACDLRLK

SEQ ID NO: 166078 - protein, 203 aa, Heterodera glycines
  unsure (1)..(203): unsure at all Xaa locations
SLYKLVDIGANLGHPSFQPDFADVLNRAKKAGIVKLLITGASESITDEAAKLASKEPDFLYYTAGVHPHDAKDFFXDXTLDFLRSHLTTNSQCVAVGECGLDFNRNFSPRDQQLRVFEAQVQLACELGKPLFVHEREAHQEMVAILSRHSKSLPPTVIHCFTGTEMEAKQYMDMGLYIGLTGFLWKDRAVDGVKHALRQRTIR

SEQ ID NO: 166079 - protein, 210 aa, Heterodera glycines
TTMTQTEANNRQNGKSGADKRRQNSAEKGRPETGYASVLTTNGSAIFHRHRKSLQDDEVKGNGSNNNGIHQHMKHRNDFGSSTSVEKREGLVGRKFGLINGAIGALLNRSVSESKALNQQHQNGGGHYGKLKAHQQFPFSQSFPVKENSKKQQQAPIAQSEPSDTDFDDSLSATSAVETGSTPMGSGATRTPIGQGSAEGDTSQHEKRPF

SEQ ID NO: 166080 - protein, 140 aa, Heterodera glycines
RLETHRVLTSFVGNLCAPNHFFRPDHNSGRFCVVSINTHEANREMVRTFFHDNEAGFTKKYYFCELQFFPMNELPWDVAVLKLYAETMGHIWDPLFTYLDEVITSLENGDMPPYISESSPNNSANSLENLPSVEAPQSDD

SEQ ID NO: 166081 - protein, 18 aa, Heterodera glycines
FFFFFFFFNNNKFMTQYD

SEQ ID NO: 166082 - protein, 71 aa, Heterodera glycines
SFFLWMNENRHRFYQPGMTQADVAKAAGEEWRRMSSSEKAKWGEKSVEDKERYVHEMNEQREKEEGEEEGE

SEQ ID NO: 166083 - protein, 192 aa, Heterodera glycines
GKENVIKMEEKLTNAEKEIVKLKENAPHKKLGVVQDLVDRLAILDEMEQCLNTLWLMPTDSKTEFYPLATTRTILRLTELCAALESESSNYLESINERILPLLFAEIETRKGELCQQLSDFYASFFRFTEDDRVSPPLYSMSINCPSIKTASDCFSAMRQLDLLEDRLEEMVDIIWEHFCLKLIYAVTEDGQ

SEQ ID NO: 166084 - protein, 179 aa, Heterodera glycines
MKKLCRSLSHALPAVLTWSLIVGCSAAFFYVLVPALVVQLGLVGYVLCCLDVVLFVLCLSNLCLSTAMDPGIHPIAISSEETSVDDFRSPLYRNVEINGITVRMKWCVTCKFYRPPRSSHCSVCNRCIDCFDHHCPWVHNCIGRRNYRFFFLFLLFLSLHMVCVFGLSLAYTMLSRRDI

SEQ ID NO: 166085 - protein, 157 aa, Heterodera glycines
PNYNRNQYFISIIDSLSQKGLLEANRQPPISHSTLSFLMERKKDPMSMVNIYCSASGEPNFEFFVFQLAVRPSKFVFISELRSRPVYGFCAASKKEAKKACALRLLDILMTEERLECVNLSGRKVRKMPPKPIPTKAANVEQSQQQENMHLSFSDDI

SEQ ID NO: 166086 - protein, 96 aa, Heterodera glycines
YERMWWTCPGIEQKECFFPLDIPKEVFWTRRSMDQSLRGILPLPNLHLLPLSLRALYHKLFKSKVNIEKIVRISAFVPSDGQKSAVQQANFGAEEQ

SEQ ID NO: 166087 - protein, 193 aa, Heterodera glycines
CLSARYLFVMAGTNAAVELESWDEMEIDESAATFAPRAVPVTEDRTIMKNVIAWAIDGKLKSLRGGANDEKEGDLFNELAQSGDFMAWTVLAYFDTLKKIAVADTVNFTVKTTLTQYLAALDGELPTAQANTVSETPTSRLLALFISFICLAKGNEARNNPTIQSPVSLENASIFRRYSAMVAGKNLPTANAV

SEQ ID NO: 166088 - protein, 209 aa, Heterodera glycines
HFCSVPLPGQPDIPHTRVELMLSARDLKDKDLLSKSDPMCVIYSLVPGKGGTGPEYVEIGRTEVIWNNLNPRWNTKVTLNYFFETKQQLRFDVFDIDTENTRDLSSQDFLGRCECHLADIVAAAHGVLTLKLKDEPGQEGKLIIRADEVDEGQKEMVRMVCHGQQVASKGICWCLSARDPFLEFHRLYADGSKQLVYRTEVQTRTVDPE

SEQ ID NO: 166089 - protein, 83 aa, Heterodera glycines
IKSFIMEKDFSINCYIAFSNPIFCHQKMLMRKGEFSFNSQERSFTAKIHNKTRLRLFPCELCAVGKKRCPNGRCLIIRYKTGF

SEQ ID NO: 166090 - protein, 90 aa, Heterodera glycines
LKNLKFRPPVITLISIISLFLFRQLSGLNVGCAWHVLLLAHYREWFARLSRRRTILRHRRSADPAGRAGRPGYGPTPSDGPSGGAQSWRA

SEQ ID NO: 166091 - protein, 205 aa, Heterodera glycines
IKLAYSLFCIILLCYITNSSAALGKSKSIAKLQNDTKNNEVMVTERGKMVVDEQSLVIENPEQNTAGMETVNDELKAVPSGGIIGSGQQNAEAAQQKPVPSSALTETEGPRDSSAVTNGGTSGSGSGQHERAAPTGAQQKQGPSSAPTAAEGPRSLGQQEQQPHVDKVEAGGTSTWIIVGSIFGGIGAGAIIVWIVISCVKRCQR

SEQ ID NO: 166092 - protein, 108 aa, Heterodera glycines
QQRTVAEPKKQPQKVAEAEELPQQTKQPQQQQEESPTTQCVQQKVRKPKSLKALTEYELCKQECRRKRDQESANEYIDYLREELRLAEERVEAEALQQQQQLQYANGL

SEQ ID NO: 166093 - protein, 65 aa, Heterodera glycines
RATPGRASALIRLISETNERALFTGDTLFIGGSARFSEGTAQQMHHALNERLDTLHDQTLVYCQH

SEQ ID NO: 166094 - protein, 22 aa, Heterodera glycines
FFFFFFSWFRKNHLPTSKQPLK

SEQ ID NO: 166095 - protein, 210 aa, Heterodera glycines
RFMPATKKKAQLDPLVRRSIALLWAYNGSDLVLLTFLPGECRFDEYCQANRKNFRVLSLGTWFSIKYQRYVKCETRINVLDVSVLVEKPPLETRVIDAVVQLCVPFVCSSANPYTDQYTYKSSLGNIVLRKSQGGGPTQLLIWCSLQTVAWWKDPMLAEVVIRNTDERKVAEERDGFGGRDETTAKGIATPTNDKSASVWRGFKPNIKAK

SEQ ID NO: 166096 - protein, 189 aa, Heterodera glycines
  unsure (1)..(189): unsure at all Xaa locations
NSFDSYHSLPMRVQSIKSCLVASAFLCLVSAFLIGFASLTPGWRSIKGQIRLLQNPPIRSFSVSTGLFGFLCSEAERTAQSADLCSNWANNVSLFERIVSILCVFGVFVGLFAFLWSLVILFDLFSGWENKPRWALPALAFSTFSLASVAAVIYLFRGCSEXDNFVSHLTSSPSSPSSSPVAKCSLHYS

SEQ ID NO: 166097 - protein, 61 aa, Heterodera glycines
  unsure (1)..(61): unsure at all Xaa locations
KMKRKIVLESDSPGSNXAAKTXRQNXSRRKRDDAPKNGKTDLKHCEMPCFIDPLRDSCAKY

SEQ ID NO: 166098 - protein, 63 aa, Heterodera glycines
KWNDNPVEIFANIAAFHLQFDELPTDPNVKKWSVHVLKLSCTKRHLDRAELHKFWEMLDRHIS

SEQ ID NO: 166099 - protein, 162 aa, Heterodera glycines
MMPKNFCGKTSNFSPKKLPALLLIIVLSILNSVSSSRRHHSPASGHNRRLSSISSPAVANGGSLFEHRTKHQSVAAADESAGGCAVVPPSLWCGCDKLQTQCGTGRLCGRYTGAMRNEPLHITLIYERLCPNCQKIITENLIDGDQKFKKNLRNEFDPIGNA

SEQ ID NO: 166100 - protein, 89 aa, Heterodera glycines
KPMRTSAYRHTALAGLAAVALITAGCTDDKDVDASMSPQVGLISTSTVQTPPHPAEVKLIGERDVEVTLTGPIAAKYKIKYRIKKKKKK

SEQ ID NO: 166101 - protein, 52 aa, Heterodera glycines
  unsure (1)..(52): unsure at all Xaa locations
DDDLYSXSVNIDYSEVISSDDEXNMSLFNCIGCIFAPCRLLCVLFFIYGKVE

SEQ ID NO: 166102 - protein, 142 aa, Heterodera glycines
MTTSATCIFCRIIRKEIPSFKLVETEHVYSFLDIGPLSHGHALVIPKHHGEKLHEIPEPQLAAILPAAKQIIDALRKETGLSDYNILQNNGRAAHQEVPHVHFHIIPKRENGEGLGVKWVPSEINKDMAKLKELHDKLTAQL

SEQ ID NO: 166103 - protein, 80 aa, Heterodera glycines
MSLRIMANVAVANTFFDCCRMPFCPLPNPALQSEGELTAICCCCLCKVTSFSWRKPFFILPLGSIVCGPCDPLNWLSSEC

SEQ ID NO: 166104 - protein, 201 aa, Heterodera glycines
IFCKNSEYAYGGHPFPFSGIFENTPRDAEELGENFKFRESIPLGETDFSAEDVNKMIQNLGQEYRGDSYHLITKNCNHFSAILSKVLTGQELPPWINRLANISGSLPFVERWIPQEWLTPIALQQSLDSRSRSIPLQNGISTAALSVPEETKADVSTDSTARPSSYTVGWRLFQRRNPSCDQSSSPANASSSSAPATSRQP

SEQ ID NO: 166105 - protein, 201 aa, Heterodera glycines
HWSNYIPNTHFLMDSKCVSLNFFALVKHEQPDEEEADDYADEQQDSANTDYKNLNGASLSAPEMPQNQQFWHAFPPNGSNGYCYDGAMTNCDGETKAIPYDETPPPKFVYTFQGPGRGRWTFSCQFTSADALDLFRKGHGMYQTKKDGCRYFFCSVKRCPYKMIGIENERQWWNIYDRNAHNHTVIPIGAKIGEKRNRNGR

SEQ ID NO: 166106 - protein, 141 aa, Heterodera glycines
MPVQLSNKLNITSVDLKGKRVLMRVDFNVPFAKGTTTISNPQRIVAALPTIQHALAAGAQAVILMSHLGRPDGKRVPKDSLKPVAAKLEELLGQPVQFLDDCVGTAVEAACAPRTAKGVILLENLRFHLEEEGSSKDEQGN

SEQ ID NO: 166107 - protein, 133 aa, Heterodera glycines
NKILGGGSPGGVLSEKIPCKSLGISLRKFSVIFVHLVEEFFNLARFGPSASAFSKIRPFPSCKYQPFPEITPLTTLTDPSTTIKLPLSTAATRRERCWPMAFPKQKWPLAAMLNSKVNREKSNELEFISQIRK

SEQ ID NO: 166108 - protein, 106 aa, Heterodera glycines
DVAGGALLGVAVGAFFLRNVLHNFRPNRYSVLDTQMLSSADGWQDIEGMPNGSEALISEKLTVPKTIVTKEQQKRPIGGQRANDYGSVREMSGGRSDGRTETAQIG

SEQ ID NO: 166109 - protein, 87 aa, Heterodera glycines
MAAYRPIYTKEKEWVNTGTADGEIMVFRPTMEEFSNFSKYIETIERSRAHLSSGVCKVIPPPGWHPRPSKNPSDYSDLNDFVIHCPV

SEQ ID NO: 166110 - protein, 77 aa, Heterodera glycines; identical to SEQ ID NO: 133335

SEQ ID NO: 166111 - protein, 66 aa, Heterodera glycines
LLDPNNQLRFKGPLTEYVNGHLPLANPSREDVYFIVKTTVPKFYCVRPNSGVILAIDKTPINLILQ

SEQ ID NO: 166112 - protein, 81 aa, Heterodera glycines
FSAQQQRKMLQRSAFLNQFHVEATYALKAYAQNMMNRGIELLKSVYFWNTKSQLLGGPNAPKNGKIAATISIDPLQPSNAN

SEQ ID NO: 166113 - protein, 83 aa, Heterodera glycines
MTFLAHFIVSLLLIVPSFIPNVFGEDCCTKCYNSMTGCLQKCIIEHKGDPACRKTCKPNVYKCAAKCGPHCPLNWTTTTPKSG

SEQ ID NO: 166114 - protein, 136 aa, Heterodera glycines
MNATEQQQPQSQKRARPAEENGNDDGAVLTKTQKVDNGDIPAATANNEASANNNVLKAKLTNNEKPGGAASADEETEEQGHEEEEESEGESGAGGEEDDQDDEEDDEQGAEGDDDDEEGDDDDEDAEGDEGGEQEE

SEQ ID NO: 166115 - protein, 49 aa, Heterodera glycines
DERERTSILSIRDKADGKERRNGHSFCCCYCYWRGNQVQSAGATEAVFV

SEQ ID NO: 166116 - protein, 200 aa, Heterodera glycines
MGRSNRHAARRSPTAGLRTIPDPRLDPATARVHSATMTDTGTATGIPMRRLDNGHDTTRNSRRLQGSPSSPLSRALARFQAMPRSKKRRAVLVGAGITLFIIAIVSLLATSGGSSGPPSGILDPKSPPFNPTESTVANLLSSANVPDPSRVWDTYLPPLLVERLPGTPSHAKAKDHIVSSLKELGWTIELDAFEDSTPMG

SEQ ID NO: 166117 - protein, 201 aa, Heterodera glycines
MSHRKFEHPRHGSLGFLPRKRCRRHQGKVKSFPKDDVKKPVHLTAFLGYKAGMTHVVRDLDRPASKMHKKEIVEAVTIIETPPMVIVGVVGYVETPRGLRTLTTVWAEHLSEEVKRRFYKNWYKSKKKAFTKYSAKYADGAKDITRDLERIKKYCQVVRVLAHTQVRKVKIGQKKAHLMEIQLNGGSIAQKVDWAKEHFEK

SEQ ID NO: 166118 - protein, 53 aa, Heterodera glycines
  unsure (1)..(53): unsure at all Xaa locations
ERSPVTVEVTIHGLKPGQHGFRFHXFRNNTNGCVSAGPHFHLVGHKRRAPTDP

SEQ ID NO: 166119 - protein, 83 aa, Heterodera glycines
MAKRKSKRKAPTKVKSIVALETQFNCPFCNHENVCEVKMDRERNVGFIQCRVCMEDFQSNITALSEPIDVYSDWIDACEAANQ

SEQ ID NO: 166120 - protein, 53 aa, Heterodera glycines
QRNGRMARVLQTHGINLGAFYAHADFLDINTIYSNDIDFMLRNFGIEGAARTI

SEQ ID NO: 166121 - protein, 53 aa, Heterodera glycines
EEQKPAGKKEKRAAEKEEKKSESKEAEKKENEEQKPAGKKEKRAAEQNSKKGD

SEQ ID NO: 166122 - protein, 142 aa, Heterodera glycines
  unsure (1)..(142): unsure at all Xaa locations
HETHLVLWIASRSSLWASIATPVTLPSLYPEHSQVKRQMRDGAYDFGRLSISAWTDSMDDRLHTTQPSTPRYNPYNSVFRAQHRLXPEHCQCAXPPTPSTVPQGRPARSEGLAQPTTPGGTRQPRQSEQTGHAGASLPVPEI

SEQ ID NO: 166123 - protein, 194 aa, Heterodera glycines
MLPRICCSSRSLLLRNLRISPALSIHFAMHQSTVAPSSAAAAQSLGCKIEPPKPRVDATRATDSDKLSTAKNTVTWALKGEGIAVVKIDIPDVKENTLNEAVSDDLRKTFDAIEQNSSVRGVVLMSGKPNSFIAGADIGMLSRCATAEAAARISRDAKIHFERMEASKKPIVAAISGSCMGGGLEMALACHYRI

SEQ ID NO: 166124 - protein, 176 aa, Heterodera glycines
LGLGRLTLDKVVMFLLIIMRLALGQLCISIGLVVVLLLLRLGLALGQRGRIVITVVLTRLKEHGRRLADTRDLGLGRTLELLERRGLGTGHLVDNRGSESTDGRAPAGFRVVVESLAGLLRVRKGGREARRGERNEDQGGAQGELEGRAAGRGAGHGGSSEERKGRLARGNGSSAC

SEQ ID NO: 166125 - protein, 160 aa, Heterodera glycines
PIKLTFCLLITMDAVGTDKFGVAWRSPNSPPHNQYPPTQRWRGPPQQNDPSIADHQPLPRQCAVVPPSLSSPAPFAAVAPKCQFGPTRPPIASEQTPAPYVHYAEPNSEHFANGISSNSHYPLNSEHQFHCKSSPMVPKQSHFDQSHFDQSQLGRQRCVV

SEQ ID NO: 166126 - protein, 193 aa, Heterodera glycines
SSDQQHQHYQQLPSCSNSGRPSDAAEFFGVAAEQCSLHHELALVAEQHADDEQQHNDMLMMMDGGSGGAQSYDVPSKALFEAVCRTFEERRQFKRLSPSRRSLRQQQQMMALDELARDEAETMTTTLLEEKDVDEQATPMAHDDRTLLVGGGEGRGTTTKEQQQNRNRANTGGSNQSTPTRRRAGTTAHCRDA

SEQ ID NO: 166127 - protein, 165 aa, Heterodera glycines
FSISLQNAKESLEISCLPGTSQIRLRATAATCGGCGTVGSSSDDGGTTAFASGGPTGAGEVVLLDIKNEIEEFKKDLKFLQFIQSDDIYNIEQFISTLKVYHPVSETTFREEVAAVVDMFIDADHFNYFFTDRDGTLKSYSCSYVASIQPAYSGVIQAQFARRCA

SEQ ID NO: 166128 - protein, 54 aa, Heterodera glycines
AAFQSGFGGAAPPSARGRGGPLGRGRGATAGRGRGKDADKEWVPVTNLGRLVMD

SEQ ID NO: 166129 - protein, 154 aa, Heterodera glycines
MTRHAKNATAASVYTYHERRKDASASGYGTLHERLGKDSMKPFDCCSLSLQPCREPLISPQGFIFEREAILNYILDQKQAYKRKLKIWEQQQRTEKEKQEAVLQREEDQMKAKFASLEAAPVPWKTEVPPATPAGNSRPPKRAAAREDDKSGPN

SEQ ID NO: 166130 - protein, 154 aa, Heterodera glycines
  unsure (1)..(154): unsure at all Xaa locations
SFLHRFRTTVNPPETQSTNIVPTVGYATVELSAAGMLCPAYDMSGEARYTNLWDTLYDNVHGIFFVVYSTYXLRLAVARDELWMLLDHKDLTFKGTPLLILAHKSDLKDAVPATEIHLNLGLNLIMNRSWHIVSTCALTGSGLVEGIDWLANNI

SEQ ID NO: 166131 - protein, 86 aa, Heterodera glycines
PLTQKELGPSADEIDRQNEFTKLRDFWGLLGQQWLLRVTVTKDHGSSDAHYLEQCIEMEELTRATASIALIYGVHSNLCVNQIRQG

SEQ ID NO: 166132 - protein, 134 aa, Heterodera glycines
  unsure (1)..(134): unsure at all Xaa locations
GRGGGGGGYGGGGGYAGYGDGGGYGAAPNAWGGAPMGQPAAQQWGGYVGTYGTPSGTYGGQQQQAAPMGGQXGGGAAAPVXAQPEQMGWQQQPAGGMASAGGAQWGQQQPVDTNQYAWPSGGAQQPQQWANDPF

SEQ ID NO: 166133 - protein, 174 aa, Heterodera glycines
MSSSSSHLCNASRFGQHSVDDKKPMLQRMLDGELYRCNDPLVQTELEQNEFWLARFNAALSLPVTERNKILRERLGHLGEGSSIRPPFFCDHGEDVFLNYNCCVLDVCRVEIGDKSMVGPAVQIYAADHPRDRAVRDQGWEYGRPVSIGRGVWVGGGAVILPGVTVGDGAIIGA

SEQ ID NO: 166134 - protein, 136 aa, Heterodera glycines
MHPDAAHEPAPARPSLAPHSLATPPVPADHTSNGINDADSAIVARALSSSPNAPPGHPASGGDWIDIDAQIGTRLDPPLPSIANVLITGGAGFIASFLVRKLVLLYPEWHIVVVDKLDYCSSLKSLADLESRPNFA

SEQ ID NO: 166135 - protein, 134 aa, Heterodera glycines
  unsure (1)..(134): unsure at all Xaa locations
NAVPFNETPVNARKCQTILCRLLYLLHTGRPLARPRTHDSFFAITKLWQAKDMTLRMLVYLSIKELCQMSSDVIIVTRNLTXDMSGRDDVYRAPAIRALXRILNDTGMLQGIERYMNHEIVDRTDAVSSAALDS

SEQ ID NO: 166136 - protein, 35 aa, Heterodera glycines
FVLSAPHHELLAIGENIFCLHFKIVYFCYGMNILN

SEQ ID NO: 166137 - protein, 74 aa, Heterodera glycines
QAQLHNTSGRSSSNGDSAFARRIQQHFQPGDGAQRLYKMVQQPFRVKFGNGEVEQQRAGSSAIPPLTPFFKDAH

SEQ ID NO: 166138 - protein, 202 aa, Heterodera glycines
MATEQQPSDKVLTTTIDAEADDGRDNNPIRDIRRRVHFSDRSQRVLDDSDHLLKSIRTRRAAPLATSMSMSTLPTSLERNGDQSLQDHARKTLIRAQRSVSPEEPLLSASTSRYLQHTPKFPRIDFDDWIEEETQAKKPAWKVLQENVKSSYNKPRATAERHRNLNDFQSAQMDNLEFNRARRRRESADLPFTELTHLDGES

SEQ ID NO: 166139 - protein, 82 aa, Heterodera glycines
IRQAPFSLQLFLALKYASAMVVSSECCSYSSSGDRPINERTDGKQNSAERGNGGTGCCCCFFCYCCQPPLYSDKICCNNDGK

SEQ ID NO: 166140 - protein, 145 aa, Heterodera glycines
RTCAIANLADCSARSCCAVGMADDEGDMPPLSWRTKAANLALSEGRPEERAQPNGTPSWADKLGLSRNDWMCSLCSKVVRSKSCNTPGCLARSRQFPIPTLRWRAQWTRRWLKRVGETKFWGPTAPAHRKERGKRPPNTYCLCSR

SEQ ID NO: 166141 - protein, 84 aa, Heterodera glycines
PLKGFKREAKRDSKWHKIGSCADNPHWFFKTKNGQITKGPLLFYFDSLFLLQVLVCLFQIALIFSWVSKLILFSGPPRGGLVHV

SEQ ID NO: 166142 - protein, 205 aa, Heterodera glycines
LESNDPLTKFFALYLLQRMCSANTSTRKPFFALSQPGGHPRNWHSLRDVAIAHVRNVRNIFQIATHCKILVHSPGVGSASISKSLADASVFDKSEEVDEDNANKSLVNRNGSLLLNSSTGSTGVLNELYEAKHSFFVPPSLNPRSADAFLSERVHCRRRLIVVPLFCDFIVNRCKELLFAPAPIVSSYDTLCTLYAIKALSKVIS

SEQ ID NO: 166143 - protein, 174 aa, Heterodera glycines
MVFFICDQCGETMKKKQVLQHIHRCRNAHYSCMDCQVVFDKNSYQGHTKCITEDQKYGGARHVPKVNKGEQKQDAWVSQVRAAIRQVDEPRLKNLLRSVQCHTNIPRKEAKFVNFLQNSLRIRDRALCVDAWNAIKRAADAEAAKAKRTTAEDAVVTTATEEKETAEHNGDDAD

SEQ ID NO: 166144 - protein, 175 aa, Heterodera glycines
MTSSRSRTRRTTSTAASTAAAGRSRSRSTHTGRRSASRRATGNRATGRSPSVRNASRRVSSAKKPSRRRRRIVARRATPKKRFKSTKQRGRPRKPQRGRSAQRRVTITQGVLDVPGRGQMTEAELREIFMAGTEAADKRNKMMFWSIIGLLFFKCIHLFPYKFILRQIHPYLYNF

SEQ ID NO: 166145 - protein, 95 aa, Heterodera glycines
MSSSLSLRAATASSARRATATVVTVTATSRRALATVASTTTAAPAAPAPPRKYGSLKDQDRIFTNLYGFHDFRLQGALKRGDWYKTKEIILKGSD

SEQ ID NO: 166146 - protein, 121 aa, Heterodera glycines
ALNRPSGHGPRNIRDYKWTGDDPTIIPAEAVLLLIPSLARGPHRDRAKAFAIVRQRLAELGINRDNCADNPAYPGWRKSCGQNGWWLATLSAFVRDILPVLPAMRKALKCRGCEACRAAHV

SEQ ID NO: 166147 - protein, 46 aa, Heterodera glycines
MAFGFVPLNAFVAITRRNGIVLVRNTTSKYYHPARIHILLVDQNAI

SEQ ID NO: 166148 - protein, 185 aa, Heterodera glycines
LVFKPNAQMGRPFLPLAFSLVLLLLAVVISTNCANASPIVGEEQPMAPEQKATKGTNDGQMGDDNRTNRRNNMAAAQHQQQNRNATSLVALGWLGLRSGASSVNAVNVASCYDSRLSSFINDGLRYYSIKRVRYSGYWFVHAAMIGGQTQGLQWQSQSNGDIFAQTSRHGCYYHDTQTYIIIIRY

SEQ ID NO: 166149 - protein, 207 aa, Heterodera glycines
MKSAGATTSSPKNSISAINNDSGAVAAFAAATPPTKIVAAAKPSPPPPSQQQQQQSIRVSSFISSNSSPFNNTNQYTNSNRGTTSSTNTGGGGANAMSTVSNNNTTSTTTVGRDLAATTAATIAAVPANVKDDNRDDSNNNNKSSNIAKPYTNPNSAKSITSCGRDVAATVAAVATVKDDNRRDDSNIAMLTNTCTTGKSTSGSGGD

SEQ ID NO: 166150 - protein, 139 aa, Heterodera glycines
RYMRDAKKTVHFYECNAQGQMVHEKMVKDYSRSAADQDTPLAHELRPLKTLQLTMDYLIFNIAGEIPSTSSNDLARWYDFLWSRTRAIRKDITQQMLNNEMAVDLVEKCARLHIFASFGLVELEADLFDHKMNTGITGT

SEQ ID NO: 166151 - protein, 122 aa, Heterodera glycines
TTPPKTPKIGGNGRAGQTRSPSRPHYQMKALKAALSHYFSPKKRSPGRPAQRKVQFDDTSSHSEGSDGEEVEEERKSEKWAKCDSNRSDFAAVKCCFEKLDNHLPWKFKRNLNGETFGRHFS

SEQ ID NO: 166152 - protein, 180 aa, Heterodera glycines
SRKSCKMAKKRLPLSENQQPTPPKRKEMLPLQTWFGTDKQFVTFSVNEDLRWAASSNNPSTSGDAKPNEKQMMPKRDGGSANASQQKAVVESVFCAPSQLQKNLHASVLYLMSLRDNEQQHLLRLLCNHPILLYQKVLEMSGDLQHKGTKKAKKEFVNFSGVICHFPTRYELCQCRIEDS

SEQ ID NO: 166153 - protein, 51 aa, Heterodera glycines
FSANSWRIMVPTRLLSSKFASDASVVQLSQSSTKSHSLTFYLVCSGRTQVR

SEQ ID NO: 166154 - protein, 204 aa, Heterodera glycines
HSMSDYDKLKLSPSKLGNLQIRRTQRTKNARVYKKMANGKENWYPLPEDQLPAEVTSFRFIEIKYVDLDVIAFLNRIQRLLQDGEMTLRVRIFHHQRRSLQIFCAQIWPLINKNIVTAVVYPSIWLPPLQQDNAQQHTTLNDLPNLKLLEYCDVSPSQEVIDWLHNSSADGRPKAVRCGLPRQMVDELRARFVAASSPTIFIVL

SEQ ID NO: 166155 - protein, 73 aa, Heterodera glycines
SSKTLTKELQICFGPSIYTSSYLKQKKQSERRSKALSNNSNTKMETSRNSTNSSLFQWLGLLEDSDQPPDSTP

SEQ ID NO: 166156 - protein, 62 aa, Heterodera glycines
MNLFSLTPLVLCSLLFVGAPVVQSAGKVAPPPPPPPPPPPPPAYEPPEPPSYGAQPPPQPAY

SEQ ID NO: 166157 - protein, 133 aa, Heterodera glycines
  unsure (1)..(133): unsure at all Xaa locations
EGLALKDKLKTMVCTLVQDVXNKTDEETGDGTACATVLVRAITKEGFKNISQGANPEEGRKGLMNAMDKLAKELKAMSKTATTPEEIAQVAPIATNGYKTIGKLISDAMKKVGNKGGISVXDGKTLLDALEMD

SEQ ID NO: 166158 - protein, 122 aa, Heterodera glycines
VDLAEKNLSNPHRIKKILDGKLFPMKALGYFGVVTGMDKRDASIAEIRKYEEDFFESSKLFRDGVLKATQMTTRNMSLAVSDCFWRMVRESIEAQAEAFRAHRFHLENGRKTTFAHHPDLTR

SEQ ID NO: 166159 - protein, 163 aa, Heterodera glycines
LFPGSSTINQIERIMNSINRPSKQDIESIGSTYAASVLDKMPQRPKRPLDALLAQSFPEAIDLINRLLVFAPHKRLNVEQCLTHPYVVQFHNASEEPSLDYEVKLSLPDHIQLSVHEYREKLYEIISTRKINIRRIQYDKLTSNECEGHQRKQMMTNGSREEN

SEQ ID NO: 166160 - protein, 162 aa, Heterodera glycines
MRDFYSLLNCDKSASAEQLKQAYFQQLRKCHPDKNNSLQQLDPFLDLVRAWKVLSDTVARANYDCWLCEQQFRVDKELIFDEIWLNSSAPFPSSPVPVGGDFEEECRCGGIYQVSAEAVEQLALDYLLVDCSNCSLTLRVWRCAASPSPPREEASAISKANA

SEQ ID NO: 166161 - protein, 36 aa, Heterodera glycines
FFFFFFFFFFFFFFFIKEEFFFSEKVKQSICIRRRE

SEQ ID NO: 166162 - protein, 167 aa, Heterodera glycines
IKCSMPTAPSIIAHRHHQHNDRIQNGHNANVVVATNGNGNNSSSNGNGCAPISHHRSAAANRALAMPNVDQQAKMAPTSRKKGIIGTRDIVDAKLSEPRCCCGLVQIRHVAIVLGVMEFIFFATQLIVSLVDLFGTADDLWPKSASTLSILLTIISLILAIAAAMLL

SEQ ID NO: 166163 - protein, 203 aa, Heterodera glycines
MKMLLGAAAILAFASADFVFGGGNQMEFDPTAPMFPDSQFIDLISRDIESFSGPMAFGHKFMSGGAGEGDQQLGPDGPFEHRQQVKSDSVLPAYCEPPNPCPVGYSEKDGCMEQFDNTAEFSRSYQGQQQCLCDQEHMFNCPSKENAEEYAQGLEQLLSNNGLHKSMIAKKFHLTRAEEPRRRKRSVAFVGPAHATHSRYNPY

SEQ ID NO: 166164 - protein, 121 aa, Heterodera glycines
  unsure (1)..(121): unsure at all Xaa locations
MLFLPLSLLLLLHRPFANALGCMXAVCAAGGPSPSXHAVNRTIRCXSESXCGHXRALRRNDQFXEAVDLSCPEFSVVXAPXXGEISAYRPMGESRAQEXTKGECVPDQXVQIDGRSQWQGL

SEQ ID NO: 166165 - protein, 136 aa, Heterodera glycines
  unsure (1)..(136): unsure at all Xaa locations
GRKNRIRGTYENHDQFRXLTFMEDGPXYAQDVNMLDNGRLQALCFDRAXHLANVLRKMHKMVWINXGDLILLSLHDFQNNKGDIIIQYTAYEARTLKYYRELPENAWIDETDSCFRCYDGXAYFEFGDSDSEEESD

SEQ ID NO: 166166 - protein, 107 aa, Heterodera glycines
FSDDNVTSMVCAKNFTENSDQINHINYTPDGSLLVTSTADHSITVYDCDSGNKHRSVNRKKYGVDLIHFAHTKTDAIHASTKIDNTIRYLSLYDNKYLRYFGGHSKK

SEQ ID NO: 166167 - protein, 193 aa, Heterodera glycines
KSLAHRRRSQKVSVSTVLQKPLKVSFSLALTKPDSSSSENCSSDEPSIRKKKRRSRRVKLPVKQVVIPSSVKKETKIQSLPKETTKSQKPKKESQTQPKSQKKSQKEHQQPQKKSQSPQKESQTPHPPPVEGPSVSALVPNTADCKRRVNFGNVEVFRFEFAQGHDTVPAKGGVSLGMQNTHHARHLFQLSEY

SEQ ID NO: 166168 - protein, 194 aa, Heterodera glycines
DAKNTRKNSFPFIHPTIFLVFCSPKSQPFFSLSHIARLSICCPSILLLKRSAPRAAVAATRSDGASAVSARHHRGHRLRRTARCCSDRRTPVKSRAEAAAVAASSHDHHHHRRRRMTCRRKHQNSRNHRRRCDAYRSHHHRRQCHVPSRAAGGNLLRHTSAAAPPCPSVGADCHATTPCPAADVAAAAVVDVAA

SEQ ID NO: 166169 - protein, 171 aa, Heterodera glycines
MIFSINRRIPSLLPPLRRIPPSLFPAPISMLLIPSFPLALLPFAVGLPSAGIRSLPNVSPLSHCFGLSPPRLKRQKSVVLKSVGTEEAEPIVHSGKSIWIGAGKYQFWDSAASLVGRGSYGIVFRGHQCFSSDRPVAIKRMRRMNVRPDELEAMKRVQNQNLVTLLDVCDD

SEQ ID NO: 166170 - protein, 71 aa, Heterodera glycines; identical to SEQ ID NO: 143799

SEQ ID NO: 166171 - protein, 203 aa, Heterodera glycines
FSRFGQVTNIQVQYEGRTDSALVTFKTRREAMSAYKSTEPLFNNRFVKVFWQNDANGKEIENEDIGGGNVGEIASTGPTIPLVDSNATNRKTVLKEPIQFPRYFTKVFAQQKKEGGDGSGSAEESMTVTAEPSDDKKSLPTDLATAEHPPPVSVPGITAPQHPVRPIYNSKLATQKKRAAIERDRLNKLAEVQRMKTELYTKL

SEQ ID NO: 166172 - protein, 127 aa, Heterodera glycines
SGKVTSRGCVGDSRWHPARTPRSPVLRRRSESYPLHPWDSDFAAPLPTSSERRGRPTPSEALVNFDLLLRSGPLSAPANHQGRMRGLKVRIPGSWGVAEAIKESLMKSIMTGKTHIMRCLDEIRNGK

SEQ ID NO: 166173 - protein, 124 aa, Heterodera glycines
  unsure (1)..(124): unsure at all Xaa locations
FFFFFFXIFKNFQLIEKYKSASIFLHHAIPIVRLFVPSFAWHCRQFVEGTLCQVEETVYVSWALTVGRQHVFPPFRCSIPRKICRHWPINLHILMDSLLKKNSHVWCDSRKMRRIKLSIMNFKP

SEQ ID NO: 166174 - protein, 97 aa, Heterodera glycines
SERHKAVIKKRELSSKAVIRIEKQKRRKRGGGINSYKSTLIRDTVFPGAKNVLEHSLRDVFSTELHNFAFDIGIFRREKRKSLFLLLQSELNAKFPI

SEQ ID NO: 166175 - protein, 124 aa, Heterodera glycines
SVFFMPTDRPLLLPFFAMYCFNLPAPIRPPISNRSSTKPRPTTLSPSASSVSSLRMAKSIGKCSPRSSLAMHCLFLENAFFRSVINTCLSSDQFLRTYSGWKRPRDSTHTQKIHFILFVHYLCI

SEQ ID NO: 166176 - protein, 90 aa, Heterodera glycines
  unsure (1)..(90): unsure at all Xaa locations
FFFFFFXGNKFIFIKLQRMKNFEGNVIKENDEIEFSRLIIICFWFGMMECCALYVTELQMRKTKKRTQMSRVASAKSIQVPMLTSPLAIV

SEQ ID NO: 166177 - protein, 141 aa, Heterodera glycines
MPSLRLLPLLLAQLPFCVFGFGFENAGASCSSDEYCPGGWSVLRRPKDYSAHTCNPADPRRAKCPKPYMCVAAKCGISFCCASDKMLDKLKEQQSVEREAKEADDEEREEARRREKASLAEDAEKERETDAIERSAGGDDL

SEQ ID NO: 166178 - protein, 209 aa, Heterodera glycines
MNRRWVCTDVWMDILPFFNRLQLGLKLALLSPRFDVLVDKHFDGKCELTIWRHINILKGAGPEPELSVRIDRKTMKFPLPDRPLPTKIRIKDLHIEYTDHSVITFLRANQQIFDKGIDLDLYWDDALHDNNSDDVQQIWDVFAREIWPIFAPNIRHLNFIFGYDLENLRRHISPTILSDLNINSIHSADLLPEMIADDGPNATAGQALS

SEQ ID NO: 166179 - protein, 111 aa, Heterodera glycines
HVEMCSAIDFVRARESHFLSSVQSGRNGHLHGELGRAPPNLGLTLRIGHSLLISDHILYLVRYCFNIRSISFPFFSFLPQKFGPFRQIIFNSRQMLAFSAFWSFFPSPTLS

SEQ ID NO: 166180 - protein, 122 aa, Heterodera glycines
DKSVIWVIEFFTTWSPDCRYVAPVFSALSERYSLPNLRFGKLDVGKHPKEGDHFRVNGHASSKQLPTVALFRNGVQTERRPLVQQRRAVPFIFNEKNLILALGLNDIYAECKKTERTRRKNE

SEQ ID NO: 166181 - protein, 73 aa, Heterodera glycines
  unsure (1)..(73): unsure at all Xaa locations
FFFFFFFFXNCYFNDKSTFFNGLINTRKCFCHKLLLSSTLTRTISTRPKLAPPHLLRARPNFQSEHWHLNGRR

SEQ ID NO: 166182 - protein, 175 aa, Heterodera glycines
MKAYNDNMERYIELAIQDAELRETSNEGQSNYEEQKKRTDGTRKLLEFYRKERDMFTEGLEKASVNVEEFKFPTENVEQIFDGLFALEITGKQMKANYETTKEAQREHQKQSNAEAMRAQNLVKAKPTKCQSAYNQKAIQCYLDEMTEKGQQQLGQGWKADGSAEASSNVDMTDG

SEQ ID NO: 166183 - protein, 160 aa, Heterodera glycines
LDNGPLLSEALLNFLFSSFDSSNVAKLNLMKMCAEVLLRMIVAPDRRNLSVILSSIKSSGSEFRPFELLHSFTTGSNLDSDLYLAMLKIIKELCKREPALKSQWSNLENVQFLSSNSMMSSNSEIVNLCSEVLEMLQMGGEDQFHDASLFDIFMNEYTGK

SEQ ID NO: 166184 - protein, 110 aa, Heterodera glycines
MARRSNATGTRKPHRYRPGTVARREIRRYQSTTELLLRKLPFNRLVREIAQDNNLEMRFQAVAFAALQEASEAYLVRLLENTNLAAANANRVTIMPSDIQMSRHIRGETL

SEQ ID NO: 166185 - protein, 194 aa, Heterodera glycines
CFTNKLFIMKRPSSVVAFGSHLFVGFILLSLFIGTLGTEKKETKPAAAHSPADAKHPPPVAAHAAAGAGHASDPKHASPSPAGAAAAASHAHPPNGGAAHAAEQLISLLIFVLFQPKHAAAPAIKITDEANNVYSVCVERDVLPAPENASKDKLKAIAAKCDECGAAKCKAKCGGKEVNDACRTCIMQNCPPAK

SEQ ID NO: 166186 - protein, 197 aa, Heterodera glycines
MTSSAAKIGGGGGASVEELNQLLSKDEEWLSSFQGILEKSATLTGSVCSLMDNFQERIDSLSTNVQTLVAKSSVIQKEQQNIRKLLSTVDATIQFHGKTTVLENTIRDGGNVLLNIDDYLEKMRNLKEAIAFFATHPVYRNHEHIKQIYEIGCANIESEFGNLVRTSCVPVDPTKVFEYLGDDYEMPSFRLSSFVTL

SEQ ID NO: 166187 - protein, 209 aa, Heterodera glycines
  unsure (1)..(209): unsure at all Xaa locations
SLICRQIMRLNVLLAILAPLLLLIATATLCGATGKEAAANKIGVAAVALSEAXXNSXGRXRRHRRSALRRGGQRMTKKKDDYRLERSRDEIRQKRXXXXNGKAENRGGKKNGDXXXEXXVXXRXXAXXGXXXXXXXXXXXEXXXXXXXXXXXXXXXXKXKXXXXXEKXKXXXXXXXXXXXXXXXXXXXQXXXXXXXXXXXXXXXXXXXX

SEQ ID NO: 166188 - protein, 161 aa, Heterodera glycines
WDAQKPKGRSPRTPSVPPANNQYAHVKSKVRSITEYTPAPTLVKIFHESVRVTASPKVGSLQNVSHVHTGENVAIQNRKLNFREAVNPRVDEKSEVPIPKSEKNSATQKLEWKGQPRVRSMDNVKHSPARSYHKIFHQSVRMKCESKVGSLDTSDTCPGGA

SEQ ID NO: 166189 - protein, 79 aa, Heterodera glycines
AAGGGLRQRQAGGAANTGRTSNCWRRRGRRNEQQLTVALLYCRTLPGCKIGPVPVLVMSLEFIGSVFFFYIWGKCIPTH

SEQ ID NO: 166190 - protein, 83 aa, Heterodera glycines
AFVNGLLKTKPVVIVSKEHCPFCVKAKDAINSLKLKPGALEIVQLNHRNDCAQTAFCLMELTGARSVPLMLIGGTFFGGGDDT

SEQ ID NO: 166191 - protein, 73 aa, Heterodera glycines
IASVCSLLAIIAAVVALPSLYSEMSQMNSKVRDGVEAFLVNTYSAWTDLMDVKVVVTPPANPRDNPFYYFFRA

SEQ ID NO: 166192 - protein, 191 aa, Heterodera glycines
MSAANKIIKAAGVKADELEMQVAQAIFDLENNVAELKADLRAVQISAAKEVDVGKGRKAIVIFVPVPQLKQFHKIQQRLVRELEKKFSDRHVLVVAQRRVMPRPTRHSRQKQQRPRSRTLTAVHEAILDDLVYPTEIVGKRTKLRVDGSKTTKVFLDKKDATYLEYKLDTFSAVYKKLTGKDVHFEFPQYQ

SEQ ID NO: 166193 - protein, 200 aa, Heterodera glycines
HQCPRGWPAAGDQCVQLQFVPTRREHAEDKCESMGAQLVDVTDGEGELNEAMVEDLSELLQESLEAGVNELIWVVGAGKWRSEWDESGERVRFSRREAQQQRQEGEEEEGMENVLALQNVLLHPPSVHPFICQLWPLWRRLLLYEQSLLPKGAPLLEEQPRPSYFFDPNSSASNSSFLSLPCSASGVPSPTVRWFRNGGE

SEQ ID NO: 166194 - protein, 192 aa, Heterodera glycines
MYPGHHPASVRSATLGRPPGTGPRLMDENGLDDTDHSSSSSYSNATAMAPPMSAVKRMAAGTPVPGTPSLHRGLFKKPGHLTAATPSKPHVASATPRQASQTPGSVKPQPSAAKLTGGAPARRLLFPSGTTAVPGTPAAGSSHASFATTPSARHLQMQTPRGPGPASAKPTPARSMYAAATPAAALSTSMSS

SEQ ID NO: 166195 - protein, 163 aa, Heterodera glycines
EREGRAKRSSRSSSRTERHRRRRSSAGSSRRRRSRDRSRETTTTTDRARKNGSASSMMAPPTATQSKVVPSKKLTAEELEERRRAMLTNASWRDDMRERNLRDAADKLRKEQDEMANNRGGAGFMRPMMNTATEDASIEKRLQSNRMNIQRQHDHMDKSFVRK

SEQ ID NO: 166196 - protein, 101 aa, Heterodera glycines
MSSPSDSKFACSTNKSSVGIPPAAIRSFLFASVLRPFASILIYCYHLPSPLLLPCFSHIHRYPVFVPFSHFFHPFSQKLFRITIIFIDLYPVNFNKISFLF

SEQ ID NO: 166197 - protein, 126 aa, Heterodera glycines
MSWRHIHLWRPRPMAPTPAVLPMRSRTFSSTSCALSTSTTGRATPHPTSSKTASLLTASFTTTTTTTITTTKPTTQTTTAQSHSTKCRPPCLPCSPRPSPTRPTAAAPPPKNCHPTTTTTMTTTTT

SEQ ID NO: 166198 - protein, 60 aa, Heterodera glycines
RCISRKLPNPGKPPILPPAKTKLYTVTQFKWGNPDDIADLLWRRHIYNSAFLSMRRLFRG

SEQ ID NO: 166199 - protein, 177 aa, Heterodera glycines
DCANGVYCLSLCINYCFFALHLLANCLSSILHLQMPNSTVKNVALMNGTSPAPSAALPRFNHPTPSASFSFPKGSFFSSASASVESPMTATKNHRPTEPLATAFLGASSSSSNGTIEHAENGGNGHQPMTVILTVRMLMQGKEVGSIICKRGDYVRQIREQSGAKVNISDGSCPERL

SEQ ID NO: 166200 - protein, 90 aa, Heterodera glycines
  unsure (1)..(90): unsure at all Xaa locations
PIGTAVPARCIRXVGIRKHCQXSPRRHRPXQAHQRHRGHRHRHRRXFSALNAXRHINFVFLQMNGRKNNGHQNEQKKDHWVRWIHIAKRE

SEQ ID NO: 166201 - protein, 148 aa, Heterodera glycines
MNSLKSASFAILATLLTFFTLIHASPVPTPQDPTTRNRPGPSGLPPPSPTAFVRYLGDGTALIENLGYYYTQVLQQCRGLQGTLPIENVDINTRYLDGRPAYALQFFGDWGCRGPVIAQTTGFTGNGEPLRGNNGQVIVPKSARFVPA

SEQ ID NO: 166202 - protein, 161 aa, Heterodera glycines
GINITFVAMLPSNLFFLLMTMLSSSLLHQTLANKFSAETDAVNPTRLIQRRHLIRSRAIHKEKMHSNVNEGYLQWEKDKFHEALGEKCGKKSNWEQRDFGILRILPKSSRSLMDPKFLGSVEPRLLKTSADGTRTKSDSEEENWRNWLRRHFPAARTISDQ

SEQ ID NO: 166203 - protein, 185 aa, Heterodera glycines
KIMGTKIEENSSKSVSEDDTSAEEEDEENIENFRPNGTTNRKRAHRNPTSDSAQFRNLLDKAKEDFKQKWEKARNISSSSTANASLIDFERIRMIGTGSFGQVLLVKHRRTGKYYAMKMLEKQKVLKLKQVEHTISEKRILQATEFPFLVKMHYSFKDTANLYMVLEFVSGGEMFSHLRRIGRFS

SEQ ID NO: 166204 - protein, 204 aa, Heterodera glycines
SAILLPITKFPVLLKGIGRTKLDQQLASLGEFESFYKWQSQQMQSLDNGYTKSFTLLDGPPYANGEPHVGHAINKILKDFILRSRVQLGHLVRMKSSTSDPSKSPQKIVAEAVKEMELYFNALNNALIKHLSLNINLKAYEDLSVTLDNGETHRLVKFARISLKTPKGPIVLNFADNPAAIKPARIAIQNMAENVTPQVDGIVI

SEQ ID NO: 166205 - protein, 198 aa, Heterodera glycines
QFETVDFLDGKGTAEKINKFVKEATHKKIRDLVTPDNFDGNTRLVLINALYFKGTWADKFDSKFTKKAKFHVDAKNFKELEMMHLTANFIYFEDTQLQLLGMPYKGKKEFMFVLLPKKRFGLTELLAQLDGKKLMKLIKKRDIETVKVVLPKFKLEATHGLNKPLTNMGMPTAFTDNANFEGISGKKTLLLSEVVQKA

SEQ ID NO: 166206 - protein, 164 aa, Heterodera glycines
LISPLGVTRGFLDAAKTKVGAAQGITNAAIQAGSDGINLGLDAVQGVEAVKSNALRGVVNITRNLGTEVITQTRNIANHLPSALGIRGVANLGLSGAQGALDLGANAATGVFTGAQALVNGTLEGGRTVSTGVSNAAQTGVNFAGNVVGGVIGAKSNAIGAAQN

SEQ ID NO: 166207 - protein, 62 aa, Heterodera glycines
MIGSKFIGNKAGMSSIDKEQVARIIAENTSANFEGYEKKRASRIDEQIKRNRQRLDSLTEQQ

SEQ ID NO: 166208 - protein, 214 aa, Heterodera glycines
LFSFLFFIAQLIFTDCQFPEPTRSVDLWDSFGTSTANSFGSDESRGNVLVRLSVGEVVGLRVTIPNLPWTPWQDPNEQIPADRTHSELNPLPGNNNVSVFAFLGMPYAEPPIGERRFRAPQQLIHLPGPSPFLANTLPSACAQDIEAHPSLFVNDPFPYSVSEDCLHLNIFTPSVKSFSSSVSNSLPVLVFFHGGNFQTGTANDWPGHVLASRG

SEQ ID NO: 166209 - protein, 156 aa, Heterodera glycines
NFRNCPGTTRAEWNKWGELAFDEMDGTFAVQQWIQQCIGRDAHGLDLILDCPAGVDEGVWKYEQLRQFCLELIFLFVLLQEQCHPESCTQMTATEQWIFLCAAHKNPKECSAIDYTRHTLDWAASLLNSNRYFPSRATIKESFIAQIGSVCRRLCR

SEQ ID NO: 166210 - protein, 178 aa, Heterodera glycines
PNYFFSLSFVLIISVFLLFTPKAMVATRPFRFDRPAPQPQRVHPVSLIQMVTAAKIVDEQQRAKERTQTPLVYRMDPQLLIRFVTFNKIAQKQAAAKYLATKKRREKDEQRMREFVRRAVTPPDFGQMDADAMVKLSDFMPVLNLEFFLSAISECFFHLFRPCRPNLTALFATKRSLF

SEQ ID NO: 166211 - protein, 205 aa, Heterodera glycines
MVISYIWQMFALLIPMAHIVNSGQISYNFQIHFRHFGLDAWAQFEKPCANGTKLLILTMSRREGFDSRKGIRTWMKDAVAAEELRFLIADPGKNEADDVQQQLVNEQKEHGDLVLMHGFVDVYAHLHIKMYSGFVWQQRHCAGTEWVLKVDDDIAVHVRRMVEWTEIKFGKMATEHPLIYFGVPADRGLSRDKNSKWYVPYEMFP

SEQ ID NO: 166212 - protein, 181 aa, Heterodera glycines
FAKMAKITQIKNGEERRIESITRRKNELDERRRLINKSLTGELKINKQTRFADSDEEEPTQNSKPFSFLASIGRIYPEQNEKSKNTNVVDDSAEQFLEKTRLTNETEKSAPKLKNISLYKPPNGDGDIRQCFFVNEHTPEIRSSFSSFRRHQKEETLRKEWDKKRAPIVKFYKKERKSALR

SEQ ID NO: 166213 - protein, 175 aa, Heterodera glycines
PSPPTPPNGTTPSAPTPSNGTTPSAPAPPNGSTPSPPTPPNGTTPSPLIPPNGTTPSLPQQPPPVAAAPSPSPPVGNVLPLLANGQYAVGCADIMLSEPSAASSSSAGGVGLFARLFYPAASSVVLADPSTSSATTASAFMRWRPDSEYMVGVANYQGVSMFKKNLFLDWGVGDK

SEQ ID NO: 166214 - protein, 181 aa, Heterodera glycines
EERIKTELRGIQPSEDQDLLLDSCKANTISGLTEQFTSLTTLSLINVGLTTLDGLPKLQTLGTIDLPDHKLSGGLDKLDECCPRLYHVNLCADKITSMAAHAPVSKLEELAALDLFDCAITEGEEYRSIVFAMMPQLKYLDGFDRNDVEADISDEEEEEGADDALEDEHHSHEQDEGVDTD

SEQ ID NO: 166215 - protein, 71 aa, Heterodera glycines
FIFLAIFNGRLGLLSIFCTASSVASTPISVSPCLFISSPAIIFISSFMLASLSSLFFLAILAILSSCAFFF

SEQ ID NO: 166216 - protein, 186 aa, Heterodera glycines
MQSVQSSATAAVTAASTVPLSIQNEILWIKQDALQVRNAVILLEQEKDSLRKAIRILKLENGRLKTKVKTLNEKVAKISNEEMDDEEGKLAPESELDYDELNRGDFYLIGGVHDPISLRFEAAIRDQNAVEHKSAERYYWYKMAEFFGDEEAMKSILHAQNVQQAEEAMKNIKGFDVAEWDKVKLK

SEQ ID NO: 166217 - protein, 131 aa, Heterodera glycines
  unsure (1)..(131): unsure at all Xaa locations
MQTRDRPDHTTSMVMIRVHLRRMLDHAYVAQAAVEPVHPLGWRIFREEIVDYPDINEHLKATLLGMISLELKNEIIQWIDLKNVCQMLIALGLDNRAYYEHQFXRPYPPMKLPNFYXLQVKKFLAENSACV

SEQ ID NO: 166218 - protein, 155 aa, Heterodera glycines
KQLGVKCRDVRTREVGIQEIHEKVRPYQVELVRRDYSANGGWETFLSYEDPDQDILIGMLRLRKCTEKVHRTELKGGVSVVRELHVYGTAVPVASRDPTKFQHQGFGQLMEEAERIALTEHLSMKISVISGVGTRHYYRKLGYELDGPYMSKMLD

SEQ ID NO: 166219 - protein, 158 aa, Heterodera glycines
GVYYRDDYDYLRHLKEPIVEREVIGADEQTTSKQFNSCIFETHGVELRMGMLNRAAPSNELLPDFDPDIVAALDGEIENLGADDDDELDDDFVAKANAPGGKDDGKLFDYRNENRGKDEILQRFGLRNVREKFSGESSADEEDEEMASSVTQSEVDER

SEQ ID NO: 166220 - protein, 58 aa, Heterodera glycines
TLSSKKKKKRGRKKKASSIDSTLNYNFTDTIFFIYHPQDFHFIPIVFPHATPNSKYVH

SEQ ID NO: 166221 - protein, 30 aa, Heterodera glycines
ILLAVTIIYQYFEIFVKEQQEMGGVAGLFF

SEQ ID NO: 166222 - protein, 115 aa, Heterodera glycines
SSRTSSSSLPSSPSRPPPPWPTTPPTAPSLPLPPAPTTATAPAATLPKKPSKPRPHPRRLALLPTAVTAHPRPATTRLLPAALRPSQARSRPPTTPTRRPVPPTSTSVSRKPRAT

SEQ ID NO: 166223 - protein, 182 aa, Heterodera glycines
PFLMVELSAVCFVYKSFIRHLLITRLCATLTMENPDANSSTIHQLNGVGLGGQNGRHRSSDWRYKIRNQTAEREGRDGVNSSVGFSAARRHIRPEDILWWLCLLLTFRCFDLPAVLVSHCRIDRQFLRLAFVCAFCLPFLSVAYAFVNLTYRSTVPFSLLRIFQFLSIFCLICASIFFCLAT

SEQ ID NO: 166224 - protein, 123 aa, Heterodera glycines
SFNDLKSQFIPPHFCLFPDRFWGSMSRGGGEGDGLSKNWGDRKWVGFNEGGDRITTKVLKRKRNSENQKLLFKPQPIVNSFFGANANSSNGTFSQSVPSAGTCQLLYCFQMAFSPNHCLKMTF

SEQ ID NO: 166225 - protein, 58 aa, Heterodera glycines
LLAFSDSLRKNFLQTFASTVNFPPFLLALLAVVALRPCRRPPPPPLPQIVHFPNSPIL

SEQ ID NO: 166226 - protein, 141 aa, Heterodera glycines
RSLSSSSGVRRFRCNGSSVNSFGIGMTVLVAASFVVRFELDDASPPPLALFWRSATFLLIGLFERAFRGILGLRLVFMSILVAKCWFSLSSEILGFRFVVRFLFGWLISAALSPCSSSPLFGVLLSEKIYLILKFLYNNLD

SEQ ID NO: 166227 - protein, 185 aa, Heterodera glycines
MPELPMNLTPLRDREKANVNDTEARQNLGKLSTQLLGTYPMPLSEHEKVKYTVQTKTNAPEFARVEMSVVREHDEFIWLHNCLEDNEEYAGFIIPPAPPPPDFDASREKLQKLGEGEATMTKEEFVKMKQELEQEYLATFKKTVALHEKFLTRLAAHPVFQKDQNFRVFLEYENDLSVRSRNKKE

SEQ ID NO: 166228 - protein, 197 aa, Heterodera glycines
IPSSIPSTSTHSLQSSNITMGVTGLTGFIDHHALVRNLTFSKAAKAAQDANEHPHPHRLVIDGSSLVHHLYFCNLDWAMGGQYHAMILLLDRFFGHLAAAGIEVAMVVFDGGRATATKELVRINRDTKRADHSYHAMKAISVQPLVHLRHGLPVLATGETSSRNRRSFGTDPTLPVLAISLAIRHMRDVLNIPVRVA

SEQ ID NO: 166229 - protein, 208 aa, Heterodera glycines
MLNLLLFLLIVSPILAIEKPWIRRDPITLTKFSCHFALKEAPKYKWQELWYDNMPIDHFSFSDPRSFRLRYLLNTDSFRDKNAPIFFYTGNEGSIEGFAENTGFMWDIAPEFGAAIVFAEHRFYGKTQPFGNESYTKLENLGYLSSEQALADFAQLIDYLKNEKLPNAKHSPVIGFGGSYGGMLTAWMRIKYPHLMDGGIAASAPVFW

SEQ ID NO: 166230 - protein, 134 aa, Heterodera glycines
VCERGNKCRQSVNNGPEIVLRFGRSPMAELDRTILKRDESVFVEHGRAEFCPSLYQGTVLRSGGGRSDETQRRIVRRAQKRLCPRVGQRLRRLSLGVQPKCSMLTSCYQEWESVRSVSEGMPTTDLKHSQLPNN

SEQ ID NO: 166231 - protein, 195 aa, Heterodera glycines
TKLRQEGTAFCAVWNPQNHNIVAVCNKKTGLLVYDLRMSNNTYAEAGKITKSAICADWSPSGELLFCAISRSNPICFNLQNSEHLRLSDPKYSNICTIKSCSFAGDQYLVTGSDDWNIYVWKVPSNWDDFANGTVNVHSVLEGHRSIVNHVKYGPRSNLLLSCGVEKIIKCWSGLPLRDSYQNPKKRERISTILP

SEQ ID NO: 166232 - protein, 199 aa, Heterodera glycines
LRMNVQPPPTATHSQPTILPMPIQNWSHELGIEFGDVLIADLLRRMCSPDFSSSLAPSARWHDIPFFEQFRSDLQFQWTLLRSVLVGGNRGKLNAKLLSILFWTVSDREEWQKRTVARLIYAAKDDKELANLVSLVIAVLPQLCQHRQQSSGELGLMSAAILLALADARRFGTEWDQFVMATDASGSTDPKNGSKVVEN

SEQ ID NO: 166233 - protein, 140 aa, Heterodera glycines
ILRVHLTHSTCVTLQNASCQPPQPPPAQAPSSQPTRAASPSRSTSRPGSPIRSPTSRNGSCGHLLAASCTAWAKLRPRNCSRARQSGAWPPRHRLPWPRHMSRRIGSLRRSKWVVGRLWRLDQPRCGGKSSSESVMRGGA

SEQ ID NO: 166234 - protein, 93 aa, Heterodera glycines
EFPFIMALAHYGFLAPKRRIEPAGISYEFSLIKDRLILGLSTLPVLQIVFQNSRTTDGDDIDGAAVSGTKNGIYWPLYFLDQIFCLDFNALKS

SEQ ID NO: 166235 - protein, 128 aa, Heterodera glycines
MKLLLHNFFSSNFLKGVTNGYPLLLRATKIERIDGTEFNGDFVKKMMPRLDYPALLQAAKAVDERAADELPKELGTDWEKDDDFLKKVHSLLVSYEIVEGELECPESHRIFNIKEGIPNFLVGADEVE

SEQ ID NO: 166236 - protein, 119 aa, Heterodera glycines
GATGKEAAANKIGVAAVALSEADNSTTPAPPPPPSPGGSDDKKKDDDYFLPDEDPAKKGQRNGHGRRRQKNGRSGRSIWRGVHFCCHSFRHGFDVRTDQKCMSIGRSGASRDPPYYQMY

SEQ ID NO: 166237 - protein, 71 aa, Heterodera glycines
ESLLQRSEQDIPKRDYLYYLVLDHSPISQYNRSLDYINLLLSAESDNPQALYLKELIPHKMKRDGLLDLAL

SEQ ID NO: 166238 - protein, 123 aa, Heterodera glycines
MASPMFAALLMALLATTLVEGGRLPLKLPPKLPKPKTSSLPRASEVAIINSCITVAQKGFKPTDSAVKTFNACHQDYWGRSASKPATGDLLKSLNQCTRPGGFKSQSTVYKKYEKCVLRRAGR

SEQ ID NO: 166239 - protein, 185 aa, Heterodera glycines
MKDQEVQMAREPTAAGAFGNGTADQQSAGDETVWRRIGPRSQTSSAQVLSPGYQDPFTGTNRYMPGCNNGVTTAQQNTKRSPIVPLPDNFCTFGLDGVSKKVIERLREMNLLQPKALQLNDDEFASAEVILSQADFAINECQIVALEKGILWSPETIVPALDLFRIALLHPKLNEIFCSLESVLG

SEQ ID NO: 166240 - protein, 53 aa, Heterodera glycines
FFFFFFFILNCMYCNWQGGWRGEDDPVSQEASGGQKRQGKALRAQGNCWLCRR

SEQ ID NO: 166241 - protein, 143 aa, Heterodera glycines
MLATGNAAHTYGKPTMAITHIDSVEITVIEARNLIAGDRFTKNDPYVKIRSGLHDKSTKVQSGTNPVWILVLKIEASHLSDKLVFEVYDKDPGRDDFLGKFELPLDELRRSGNMDRWFTLADKHGKMGGNGELHLILRPRGHN

SEQ ID NO: 166242 - protein, 45 aa, Heterodera glycines
FFFFSNAITNRSSNLSLLLSNWVISHYSQMGGFVGVPLIVYVLSV

SEQ ID NO: 166243 - protein, 147 aa, Heterodera glycines
MALPTKIHQIPNLLTVFISSSRCIYENLALEEWLFRNNGVKEDGDSLLIWRNSPAVVIGRYQNPWLESDVRFCAANGIRISRRYSGGGAVYHDEGNLNISLMTTHERHSRKKNLQIVADFLNAKLLGGCASATAPRLIANERDDLLI

SEQ ID NO: 166244 - protein, 205 aa, Heterodera glycines
  unsure (1)..(205): unsure at all Xaa locations
MDSEKEDSRFECNICXDMAKDAVVSMCGHLFCWPCLFQWMDTRPYRQLCPVCKSAISKDKVIPLYGRGGGDSDPREKIPPRPQGQRTEETNQGFPGMFHWGGDNGGHGGGGVQFSTPISLWPTNFVRHGSAMSILCLGKVADVYLIDEPSAYLDFEQRLHAAKGIKRKKSGFIVEHDFIMSTYLADRVIVFDGPQPLVNGMNRFL

SEQ ID NO: 166245 - protein, 197 aa, Heterodera glycines
IAKSREISENQTEREFTTPQVTNGSTGEEKKRNERRKEADKAPDQRSKKGHDEEANANEVHSTTGAQTLPFTVSARLFIFTARTFTYEVDVAPAVAERFESAQVVDIYNSLPPPMDPRMKRENANGISGSVPTPDRLVLRQGKCHQRIAQAFFCGGPLSALAICPRATKKGRELIAIGTFADEKMLKMESESQDAFV

SEQ ID NO: 166246 - protein, 130 aa, Heterodera glycines
MYLTVCNRYVKGKKIDAAVDLLTNGAKLLCEHKQFGSALYMASVVLKTWTDEEVDVHDKTLGRLFELMDLFAGYSREFNELMKNGIKWTSKCGEFSTGEPALHHHVGVTFANVAKVDEAHRHFMLGTTDS

SEQ ID NO: 166247 - protein, 211 aa, Heterodera glycines
ISDQEGANCCDATVGFGSADLENNRFSNDSPDIEYTLEKLARLEGYSVKLTSAGQVYANFGHQLIQQLGDERDKRRGRNSLSRDFRKLYEYIIEVVDSWYWEIPLQYPMPEKTQLLAFLDDLQNKMDFEWAEKRETDFVNFVEQCVAEVGRKFDQICRWYMDSYLPAFDYIADTLKKSFQANEFGFLFFDFNFSKVTLDDLLIRAGNNLRL

SEQ ID NO: 166248 - protein, 159 aa, Heterodera glycines
  unsure (1)..(159): unsure at all Xaa locations
CFTANSSHSLCHSFSALLCQLPMVRFLSLFPFPSLFLSFFSSPRPFFLSLLPFSAFCYDLAAICKSSFDCDFVGGMTCSMALCVPSKCHLSSECPTGWVCTSQLQCRRGCFSDDDCALIGWFCTAQNVCEQGDCGDCRMGEKCVEGKCIPKWFRGMKRX

SEQ ID NO: 166249 - protein, 143 aa, Heterodera glycines; identical to SEQ ID NO: 147799
  unsure (1)..(143): unsure at all Xaa locations

SEQ ID NO: 166250 - protein, 39 aa, Heterodera glycines
RNGNNLFGRTLEVPMRMCRLRNIFHSISPPAEAGLHALF

SEQ ID NO: 166251 - protein, 78 aa, Heterodera glycines
KDKLCVIAEPSLAEKGDSGGPLMFKTGKNNNWAQVGVASTSTCNPEKPKSTDGLTTDYTQIDCNWIEEATNGEVKCIE

SEQ ID NO: 166252 - protein, 181 aa, Heterodera glycines
  unsure (1)..(181): unsure at all Xaa locations
KTLPKPVSALCSAQAENPRRKWQFAIAWLLIASNLFVGITFACIVPFFPIEAEAKGLSTSXVGFVIGIFQLCSFFVSPVFGKYLVVLRVHRAFIGGLLFTSLCTIALGLSPCLPFGTPFFAGVLLLRVGQAIGNASYSTSSWALIGHLFPQRIVLFTGLLEVAYGLGYVLGPPLGSALFEF

SEQ ID NO: 166253 - protein, 167 aa, Heterodera glycines
  unsure (1)..(167): unsure at all Xaa locations
RVNCPDGRSFCPEKTTCCQLSDEGHYGCCPLPKAICCMDHLHCCPRXTQCDLPQLXCVNSDGNSQPFHRKMPAKTQNGETVEQKGTDKEATEEVICPDGSSKCPPRATCCPLGDGFGRRRKDFWRLETNAQQSISYGCCPAERAVCCADHVHCCPHGTQCNARGGEC

SEQ ID NO: 166254 - protein, 129 aa, Heterodera glycines
GATGKETAANKIGVASVSLAEADDSTTPTPPPAPSAGDSDDEKKDDDDKNPDEDPAKKGNGTDTGDDGEKTDEAGGAFGAGSIFVAILFGMALMFKLDQNVCPLQKAAPVGPTKLSHVLKKHAKHWAKT

SEQ ID NO: 166255 - protein, 166 aa, Heterodera glycines
EEPTQQISHPITLLDGHSDVIMAGEWLIGGDQIITASWDRTANLFDAESGKIIKCLSGHDRELTSCSAHPSQKLVATASKDFTFRLWDFRDPIHSVAALQGHNDFVTSVGFSALHHIVSGGDDRTVKVWDLRNMRSLISGIRVNIAANRNFNMEQQKFDLQFPQDN

SEQ ID NO: 166256 - protein, 127 aa, Heterodera glycines
IRILTTFHRLDDVLLHSVSHLFIGRWVKSCRLLVTVFGRRTRRNGKGCGSGRLFLKDGQRRRQLFLRNVNHSRALLFSLSSSPSSATVSSRSSGGILFGDLFRANTLRFLLFELQCFAGVLNPHGTR

SEQ ID NO: 166257 - protein, 205 aa, Heterodera glycines
  unsure (1)..(205): unsure at all Xaa locations
REPTFEGWLEQGDTLYIPKGWIFKASAGDLHSLCDFVSICRGHSFADFLEKAYAEFLKTMVSGSKHLRKNLPPLLFDMAGNSVNDYPGEETLEEKIIPDTEIFSRESGENFAAFGPSYSDLTAREFFRLSLHPVLTPDEETNICFGGAIDSSLDIGNETEVRLVRKHTQPLLCENADKAFIAHXMANSRSCEKYPEGTIDFTIDV

SEQ ID NO: 166258 - protein, 183 aa, Heterodera glycines
  unsure (1)..(183): unsure at all Xaa locations
ILPKQGLSWPLAAFFMVTDMAIGGMVTLPGAICRIGLSRGLALLLLSGLFCCCSAILLGQCWLFVLDKSPQLRQKHCRRPYVXIGFCALGRWMSILVSVGVNVTQFGIATVFLLLCAVNLSRICSTLFHVDLSQCLLLLILALLLLPLTLLKSPNEFWPILFGGMICTVATFGFILFGISIDL

SEQ ID NO: 166259 - protein, 65 aa, Heterodera glycines
FNLMQIVKHISTNIFSKNSFNCCFFPFPFTTSSSFICFDNVPGDRLGVHGQWTMPHYAHHPLSSH

SEQ ID NO: 166260 - protein, 168 aa, Heterodera glycines
MEYQRSIVTKDFYRPMGPPRDAIARRPSELAAVITEDFRDPNVFVGPDGALFMTTSSRFTNGTGGVVLLFRQNETAANGGPEGWEFKGILHKDNRWHNAVCECSGLIPLGDPLSLQTLWAFVYSMSNSVDEDGRQFLNPVIVGNFNGRKFTPLFEQMLDFATGSYAYQ

SEQ ID NO: 166261 - protein, 79 aa, Heterodera glycines
QTKSLLELIRFNNCIKRRLDCLLFFLKQFAGQSRRSHRRPRVFPIVNCAVTINSSEKLTPKEKNAHIQEKEDNKSQANL

SEQ ID NO: 166262 - protein, 162 aa, Heterodera glycines
MATVKDVAAADFIAALSAHLKKGGKIQVPEWMQFAKTATFKELGPSDADFYYVHIAAVARHIYLRKGVGVGDLRKRFGGKERRGVRPNHSAVASGSLQRKALQTLEKLKYVEKSAAGGRQITATGRRELDRIANQVVAIKNAEAARLAEAAAAAAAVNVDQE

SEQ ID NO: 166263 - protein, 188 aa, Heterodera glycines
MALSAWPILSSERDEKNQQQMLPYAKYECAISFDDGIEVPISKEGLLTLIQSGFLRDALFMTTKLLNNIGQGMTMAGRQTQNSQFSLEVWACRFQLMMALRMHNQLLDELTAFGELDSSELFLPSGANELKGSMVPFSLRLLHAEASSFSPLPYSSMVRVHKLIENTVKAIEIARRNFAATDSELGIW

SEQ ID NO: 166264 - protein, 63 aa, Heterodera glycines
ILLAFPLSISNCYLFTHNIIILNCLSICLFHFSILCYLLVFLSFFLFWCHCHLFLNFLFFIFL

SEQ ID NO: 166265 - protein, 78 aa, Heterodera glycines
PCHEFQRSAGKTTELTTINFQLLIYHNCDDVMMPCQRKVTFNIPDSYVTSGAVPAKFFDIGTVNMQIIFDHEERSCIH

SEQ ID NO: 166266 - protein, 72 aa, Heterodera glycines; identical to SEQ ID NO: 142684

SEQ ID NO: 166267 - protein, 189 aa, Heterodera glycines
MAPPPPPPVVSRPPKPVPPPPGGHDPPLSITRTLTLEPASTQVIRDLITRTGPYAYLPVVPTVTVHLNPNDPPTRQLLDLVPDLGQAVLVAADFVYSTLYGSVGIARHEPAEDRDDEENGAFNYSQANLAPNTDDAFTSRPPHPSVTTTAAEITPLPPPPPPPPTASALPTAPLPPCGPPPSLHPPLPP

SEQ ID NO: 166268 - protein, 212 aa, Heterodera glycines
KAIFFVKLLQGKSSRKFAVMSSGSRGFGRGRGGRGIAPSQTENGTIHLSNDRIVGAYSEANPNEGIIINFSDSQPSQQPPIVNVQTRGILRNCNGIDAASDVQKANGTATNEGEHQLPIADQPVPFGGASVPRVASVTGRGTRGVRGGLGRGAPAQNNNISRPPVNAEISPPKSVTFDSTTVFNGSRARGGGGTTSRGFGRGANAVELGPGD

SEQ ID NO: 166269 - protein, 101 aa, Heterodera glycines
KTKFCNYILDGCFISPFIKEIISRFMLYEAKKYSCKLYVLVALLSSLAFSLMHIGYDPFVLIKPILLPKLSEHFLFGCVLCSIFWFFPRLSLLISIHAISN

SEQ ID NO: 166270 - protein, 169 aa, Heterodera glycines
FPDSGKHCSVPDCRQLDYLPITCDACSRILCKQHRTYDSHGCTESYKKNVQFPICPLCQQTVPIKRGEKPDLRVNEHIERDCRSELAKKGRWAPKCGVKNCFRREQLVPMVCKECAVHFCLSHRHRSDHQCPKMPMVSHRTTKPKNISSKSAAEQMDALFAAQLQREEY

SEQ ID NO: 166271 - protein, 57 aa, Heterodera glycines
STMVASVHIFHIHKNIQDDALQDLLLFTEYARLALDEDKKNKPFHSLLFLAHDWSVP

SEQ ID NO: 166272 - protein, 182 aa, Heterodera glycines
  unsure (1)..(182): unsure at all Xaa locations
TWPSFLLPVFLSSVLMXACWDVGHFQLSFLWIVLFTVLYVLKTHSWIRREQHRMSMRSMIMRXRKMVMAHYSRFDYLPAWVQFPDNERIKWVNKIIQQIWPHIGEYTKVFLKEFIEPQIRAQLPAPFKSFKFVAVDMGDIPFRVGGLKVYTQNVGRDRVIMDMDVVYTGDAEFAVQACGFRG

SEQ ID NO: 166273 - protein, 134 aa, Heterodera glycines
IGGNLFIRGTGRRLNPGVPLNSGDHSRGLLILLLYPESSVELVTFACLAVRQWVLHIQPSVELEVMYAWLKKRRVMLQKQPSHAAFDVIYSWSGRNQLLLHLHSSQADVVTHSPLGRTGPHVATSPSITIRIGQ

SEQ ID NO: 166274 - protein, 88 aa, Heterodera glycines
VLGKPFKASTTAKKFEGIVAMSASFPLRFGVLLDMLHVFEPLLPRFSKLRGLCKSRLPEGFPVKMELPLFIGVKTSIFNKTRLRGDKT

SEQ ID NO: 166275 - protein, 152 aa, Heterodera glycines
ALFTFLPLPPSLLPSPMFPPFHPPSSSSPFFGPSHSSSSSSSSSSVFLHSFPPVQPLQKKRSSANDGTSPQLKNIVGPVAAEKGTDGQKEPCICERDQALVVCRRCGHDLIARVQLCCPQHPKRISLMDLRECPNSACRSVQLSEVKLPTDK

SEQ ID NO: 166276 - protein, 186 aa, Heterodera glycines
MASSAKNTIYVGGLAPEVNRHMLENLFIAFGDIVNVDVPFDPIAQCNRGFAFITFEDPEDALAAIDNLHLSEISGRTIKVNLANAAAMSASGQRIHTKAVWDQAAIPTDDLVPASGQPQSAGASVAKLPKPVSASNPRVWFQVSIGDVPAGRIVFELRADVVPQTAENFRQLCTHEKGFGYRGSQF

SEQ ID NO: 166277 - protein, 182 aa, Heterodera glycines
  unsure (1)..(182): unsure at all Xaa locations
LFMVVIIGHRGVGKTNLLLPFXDNTISTTYFTTTGEYSATVTISVWGNKITFEISDSTCQERFPSIPSTYYRGTRGDILVFDXTSIESFNTVKRWLHEIDTDCENVQKILVGNKVDEPSRPAIPETDARRFAESMRINYFETSAKENLNVEHMFQCITQIVLESCVDREKNDPRQATDVLKM

SEQ ID NO: 166278 - protein, 199 aa, Heterodera glycines
DLSNFPLSFSNRTNRSLTLSLSNQPSTRSWSFTTHPPSPPNRHLCCALSRDSLTQSTATRSIHGSRLVSLSTPTSTLHPQPPSTTMGQLIWSLWGYYMALTSAAAIMDGGLWSILYNYPTVDQLRGLPIYNGVSWPGMLSMIFALVTVAVEKSLRPPVGLRAVFYLIVSLIGFLQFSTVVGAQCYFCTSIVFMTAAFKG

SEQ ID NO: 166279 - protein, 199 aa, Heterodera glycines
PFSSYCEPFDGYLKFDGESICFSGWVQLPQGMFKHRKRGWAVVRNNTFSISQDDESRTPFFGPVELSKCVFLGKESDSESVKHLLNSSGELNTVRFTPEENHEFWLSLMAKCCSPRNDLFGEKLPMVECCGRLWVKQGISGHWNEGWAFVHGHSLTYWVQAPNAIAEVDIRKIFLVKQNDIPSSDWCNYIDHSSSGPLL

SEQ ID NO: 166280 - protein, 167 aa, Heterodera glycines
FASYTSTRQSLKINKNTNVVVQGFTGKQGTFHGQQMIEYSTNVVAGVSTSKAGTEHLGKPIFATVKDARNFTGADASVIYVPVPFAAAAIDKAIDTEILLVVCITEGIPQLDMIHVKNHLLKHNPTQLLGPNCPGIIAPDKCNIALMPGHIHKKGVIGIVSRSGTLT

SEQ ID NO: 166281 - protein, 188 aa, Heterodera glycines
MESETNEDEIDQEEQGNEHTQAEEDTSHHQQKCYVAKCLDSIAKLQRTFQLSNASADVLDRAADYMQLYLDRYANGKFGADWVRRMLFIARIHGAPLSRLRFIDVNKHNRKMAALYQSLGPGFQTRWLSGAIDMEQFFARMDFLESKYGERLWELHFVYGYENINRSEGSFFRWQIISTVRSLYKGIL

SEQ ID NO: 166282 - protein, 72 aa, Heterodera glycines
IQSPVAIPALSARLQMHGENGMVRHECAEALGSIATDECQRLLRQFVGDEERVVRESCEVALDIAELNRTDE

SEQ ID NO: 166283 - protein, 110 aa, Heterodera glycines
MPTPICDTPSISGVKKDQFEATKKWRKALKNFHESMPLSTHRRQLRTFTETFTGKDALDFAEQIFPSVFPLCNTRDKSRQLLERFLCFGYITNVRDENCKSFSDNATLYK

SEQ ID NO: 166284 - protein, 207 aa, Heterodera glycines
  unsure (1)..(207): unsure at all Xaa locations
TGLQVHGNATVXGYISALRRGSRLLELDVFDGEHGEPQITHKRTFIGAISLRNVLKCVKNYAFVQNPYPVILTIENHVGFVQQRIMADIFQEILGDHLLIPSDDLHTKPLPSPQQLKHKVLLRGKTAGGATTADINGGGTHAETTAATMAPASVAANNGTPCTAAPPMGTDYDTREEREDSPKQSQRNLPVDPKFGRLIALPSVKLS

SEQ ID NO: 166285 - protein, 171 aa, Heterodera glycines
FFFFLLLSFYFPAVLLLLVLPVPLLLVGPVFLLLFFLLLSFFFFFLLLLLFLLLFFLLLLLLLLLFFLLLLLLLLLFFLLLLLLLLLFFLLLLLFLLLFFLLLLLLLLLFFFLLLLLFLFLLFFFLLLLFFFPLLLLLLLLFFLVLLYLFFVFLFYFSAYILAVFLIGSVL

SEQ ID NO: 166286 - protein, 185 aa, Heterodera glycines
WIVVNYREAYQMYACNGILFNHESPRRGETFVTRKISRGVAKISLGQQELVELGNLNALRDWGHAREYVEAMWMILQQDSPDDFVIATGRNYTVRHFVELAFKEIGETIIWEGEGVDEVGREKEKGTLRVRVNPKFYRPTEVELLIGDPSKAKKQLGWEPKVEIEELVKEMVASDIELMKKNPMA

SEQ ID NO: 166287 - protein, 155 aa, Heterodera glycines
VCRASVGCGRFEVEGDFPEPQAIPVVVVSVVVIPDHPAAAQILFLSWKQPPQRVGRSKNVANIHIDQGPLAGNEIKHGRVDIVVRTFPGFNDDIDGCRQGLGSGTAWPIDIVNHEIDLERLLVERAGAKVDVAVAKDAAELFCFLVELAERLQDF

SEQ ID NO: 166288 - protein, 53 aa, Heterodera glycines
MTVSDDIKWWGLPLLALHEAAELYLSGMLEDTNLCAIHARPVTIMPYDMRLVP

SEQ ID NO: 166289 - protein, 199 aa, Heterodera glycines
  unsure (1)..(199): unsure at all Xaa locations
QPILVLVTGAAGPLGYSLVLHLSKRDVFGQYLPIVLVLLDIPPLTEMLTGVHYKLIDCALPNLFCVXAMTTEEAAFTDIYYPFLVRAMPRSQGMDPTDLLAAYVRIFGSQGEALATFSKPTVIVLWVGNPANTHTLICAXYPANKFPAKNFSAXTRLDHNRAMAQVAHKCAHGTTVGMVKNVIIWGNHSSTQFPDTRHA

SEQ ID NO: 166290 - protein, 200 aa, Heterodera glycines
LAFGPPTSAPTLPSATDDTDSVQENQVESWVELAPSRASLCSSIEAVMLDSASGGENSVTRDSRLSPVSLQSPHVEFETSLEQVKYRLVKDMLPFADGAKPSDWLWDWSSRSETGNVPQKSGAKSKNCGAQIGSTLTTPPNSPEPESSEFEFKSKSSNRSILKKTASRKSVFLRFDVIFGFVFSNLVTFFLGAAIGYCIC

SEQ ID NO: 166291 - protein, 125 aa, Heterodera glycines
SLVPKTKQPHSCSESTPHWRRVCENTRRNSKTGGSRWNVPSATLLTRRTDRRRTHVAHCSNWLKCSSRPFPQHRMWPVYANSLTTTTTMLMTIRDRTLLQSINRGKIVDFSVFFLRLIYIKCIFK

SEQ ID NO: 166292 - protein, 115 aa, Heterodera glycines
MDEGTTENNNNRKSGAKKRKQKQKQQSVVAEVTEPHNKQSETEEAEKEKSKNGDSEKDGKKVNEASKPIPCQSISVIGDTVKSTILFITFILYSKILFYFSLIIKFCLAKKKKKK

SEQ ID NO: 166293 - protein, 149 aa, Heterodera glycines
CYQPGHYISDCPARFNSPYEELTPYQGRKKCYGEFQCEQCKRKWTSQNSVANEAQSCIKCHVPVFPHKQLPVDKAVALGLVKLQRLPVTNIGSTSTENLIDQCTAAGIFIDDTPSGNAFNGLNSDSASSSPSSLDQPMPMISPATSLMI

SEQ ID NO: 166294 - protein, 119 aa, Heterodera glycines
KVFLQRVLRLKLNSGPKFASILCSESCSDTNKKRAIFRRKKCHKIGGISVSVTVRISANPSIQWHFFGRKSNHCAHRFRPFFSIFEFGDYDQYFPANIPVLFCPMKWHFHFKNYFISIN

SEQ ID NO: 166295 - protein, 134 aa, Heterodera glycines
  unsure (1)..(134): unsure at all Xaa locations
PRDQLGDSILIPYAKRSTQRIVLIWKICSRGSSPFGLVMIPLGASALWKPFTEGPAIAVFAGVPNVFLXLFAFTPILLHFLTKRFAQKVFFKKREQMFPTLHXDFFQRKRALGYTADQLVDASDLPKDRRFWLP

SEQ ID NO: 166296 - protein, 70 aa, Heterodera glycines
LNHRQRLNLPALVILLTILHFTSSEANVLIHTFPFPTGNSSASQLMDSFAIKMEINRLCETSPYSCSYSL

SEQ ID NO: 166297 - protein, 140 aa, Heterodera glycines
LFKMVANNSDNANPNSHEQKVQFSAPRRNSMNELSINEDINRKEGSSTSASHPSDLSTNLTIHVDEQSQMLMIHPMTEPSVDGKSQQKSTASAPAEFQRAKCLAESEVIKEKPSIRTRLIVFVVCGAIIAFCLIKLFIWK

SEQ ID NO: 166298 - protein, 35 aa, Heterodera glycines
EVLIYKINCDLDVGLRTTYKEKFIRVGLFAQINLT

SEQ ID NO: 166299 - protein, 130 aa, Heterodera glycines
MGRLIPTQNLCKVCGDKTFGRHYGAWVCDGCSCFFKRSIRRSAEYKCVAGTGKCLVDKCRRNWCQACRFNKCIAEANMAKERVQKERGPRKAKRSKSGKRNEVPKEAEKSQRESGETDGRGQRSVVSSLP

SEQ ID NO: 166300 - protein, 57 aa, Heterodera glycines
  unsure (1)..(57): unsure at all Xaa locations
FFFFFFFXPKMFYLFVEVVNTLSRVTLLNQSDQSINPSNHIRYHIDLLTKCFWHISH

SEQ ID NO: 166301 - protein, 47 aa, Heterodera glycines
PRLSAGPDLNQMVLGTEGTLGIIVRATIKILPMPDIPRFDSTPFPHF

SEQ ID NO: 166302 - protein, 209 aa, Heterodera glycines
GQRLVEELFDAVLICSGARLRRWRPPEYRMERAFKGTVIHSEQFTHSSDFRGQTVCVVGLGNSAVAISIALAHTAKQVFLCTRRGEWILPLLQSDGQKPWDWPFSSRWHFWGRRWVPKCLRNFCWEMSAQSVSPDCSQNNGIGRPMHRLLSANLTFGAEQLCPLLASGRIRIRPNILSLSDSNLVEFADRTVEQHVDALVICTGFEFDF

SEQ ID NO: 166303 - protein, 208 aa, Heterodera glycines
SESFFWVFLLFGLLFALVEVSLFALLVSPYLSKLPNSTIALLDHAIPFNPGGLAQMEHRFGCIFDQNLYETFKRQMNPRNTCDPFLLSSFVPRPLLFVFVLLRLLPILCFLFLVAAPQNALSISLAKCILRVKPTIRYKKNAKSTPSKSLPSYYSHNSPTKTTFGVKENVPISSPLPCGTQIPPKTPPLGYMDHRINYNNAAFFAVSG

SEQ ID NO: 166304 - protein, 141 aa, Heterodera glycines
  unsure (1)..(141): unsure at all Xaa locations
MRPWTFGLVKPDGVANPIAVRWLLSAMHCEGFVITNGCRLTVTPDLAGELYSSHQDAFYYGRLIRHICSGPSVAMRMELRNXINRWRTLLGPSKLFANIYLSSCAEFDEIKCKNLRQMFAVSDTRNLCHGSDSLDSLCREF

SEQ ID NO: 166305 - protein, 101 aa, Heterodera glycines
  unsure (1)..(101): unsure at all Xaa locations
MFIWLLLLPSFLFLLRLSHANLLIPGIMTERVELAPKSQEYIGFLQSALNGTEVEIRVKCEEDVEIEFDVEFAIRSSPCAKEFIVDKMRFSQVNNLLQFYX

SEQ ID NO: 166306 - protein, 161 aa, Heterodera glycines
DPLTCWFRQQTDVRGRMLARIPNLASAISKRIAWSFLIEPGRPPTDLSKFFAEFDVLESFFDKAELSATESSQKAFDANSLLKVRNRRLTCADGSRVTFNVPAELGREGITHEEFAATKQHLRIVGDLDCPQISTRVEFGHGDFINASYVRGGPLLKRSFL

SEQ ID NO: 166307 - protein, 112 aa, Heterodera glycines
SIHSINFQYLSPILHANLSKLDIFSKNSCAFSAVFSIAYDEFVPFVSSPSIGNEMISLKLFLHSSSGHFSTKVIRQKAIERAKRSEREGGILRKYLADISAKFRKKNWKIIY

SEQ ID NO: 166308 - protein, 69 aa, Heterodera glycines
ILIVVAGASGLPALKTALEYGLDAVCMEKSVDIGGLWRYMENPGQGEGTVMKSAVIFSIKDMSAYTDLS

SEQ ID NO: 166309 - protein, 173 aa, Heterodera glycines
  unsure (1)..(173): unsure at all Xaa locations
MSSSTANFPRSSVRDIPIQRSASAFAPMFGRAAGGTVPPLPSSRTTTAAPTEYYRKEVLTRTLVTRSTEALSAPLPLGRSSPAAPFLTLEQLPPQRDEMPEEYWLRYSRNVEEEERRVREGQERRKREEEERRKRVDEQRRRWEQXEVEQLERIRRERERMEQALEAQALDRE

SEQ ID NO: 166310 - protein, 193 aa, Heterodera glycines
QFVLAARMDSFSTFRGAKGGDLSVLSSLVSLLLVAHSVGQKMDIFNRLASLSRRQLLFAFLHGESLGYIGSIFLVWDMGRGHFPAVAKNFSEESKNVRQIGVDELSFFMELQQIGASPKLYAHTDAQIYKQNKSLIDTVLHNAKGSGEHFHFVDPSSVPFGAAPPSSYHSIMKASDKVPGLILSSFGSADYEY

SEQ ID NO: 166311 - protein, 179 aa, Heterodera glycines
  unsure (1)..(179): unsure at all Xaa locations
MHKNCVPMSSNVSNSPSTPPTNSVPQILLQQFGKDFVAGAVAACVAKTVIAPVERVKLILQLQTAQRTIAAASRYSSMVDCFVRLPREQGFLSFWRGNLSNIARAASXRQESLGMAFKELFKRWCVTESDRSANYRRFVAGNLLAGGLAGSVTFFFIYPLDFSRTRLAVDMGKDVATRE

SEQ ID NO: 166312 - protein, 136 aa, Heterodera glycines
MFPRLFAVGGAVTVMAVLLCMHTVVESAYTYQKLDDLMPELRQYLGRTHLGTLKARQYYDDDTAFQQQIRERKSNNLRNLMRIGKRSVPMPSQSLPADSGAKHAAELGVGAALGPIYYIPNDLVQAFRPQSVWLRR

SEQ ID NO: 166313 - protein, 204 aa, Heterodera glycines
MQKYAAESLIRLQGVRPLFLSLRTLKELKNPFAAAILETPMEGQSKTFKQRNPIPLVDEPNKKSIKDILEPAKITGDLTQEIDPNKEIMEIGGVPEEHREGRNARIYMPARTAMQSGWDNTGVWKIELDERERWENATIGWASNADPLSNISMALSFASREDAINFCEKNRWSYIVEEPPSREIKPKAYGSNFSWNKRTRVSTK

SEQ ID NO: 166314 - protein, 26 aa, Heterodera glycines
EVEVNLVITDYCMPGMTGYDLLKKIK

SEQ ID NO: 166315 - protein, 65 aa, Heterodera glycines
MLLPRRPLPPRTVPKASVCGGFAPFCAKCPPPPPPRGRPSAVWSAAGTTTSSSTNSTTWVARTTI

SEQ ID NO: 166316 - protein, 209 aa, Heterodera glycines
GLKMSVCPLCDSPVPFGLAMLAPCHHVGHANCINNFVRHNGFCWVSNCAMPVLESDVLGLHIDSPQPNWIGLNDQQSVREVIGVIRQRLVGQSQCAANVTDNDFEEVANIFERLTSPRVNANTSGKTAADPSDEWQKLKDLLLKASPIIVFVVFALLCWYATPLVLSAGAALLEGVSSLVMGLGAFLRSFFPELVASGLAFFSAYVLGK

SEQ ID NO: 166317 - protein, 175 aa, Heterodera glycines
KCRCFQLIQLLYHTTAAIVAICSIRPRSFMPKFHFIATAIVFPASFTVVMLFWGLYLMDPATVTRKEARFIFDFKWFNHALHTFPLFAMLLDFSIWHHRRPSKVSALKAILCFSLFYTIHIHFFYVCFNFWAYPILAQMSFRGRAWFILFCTIFMFCAFAIGDAFNRVLPRKLRV

SEQ ID NO: 166318 - protein, 108 aa, Heterodera glycines
MDTDAQLTDHIVNKHPEYMPNSLAANVAPATADSQIVPTYVDEQGELWRCVDIATNGELAEEMFQRNGAQPLQQQQQNEEVGRKGNLDTNLLINYNNCFFTIITFVSK

SEQ ID NO: 166319 - protein, 52 aa, Heterodera glycines
LTSVRSVGMFKFVHFFCSLATFPLLISAISSNCFYLPHIVLNGGTYDKFNAS

SEQ ID NO: 166320 - protein, 160 aa, Heterodera glycines
MNWFEPRVLRSARPFVPSGGERRDEVGKTGDDQAVVHMMCDLVLGEIQAEISRVEKEMERRRQDERRLTNQPDYSWLMDWRLRAKRPLSFRESSEVELLCSKVRAEEWRRLLKEWHIKVRFAESRDEVLDTFRALVDEMARERMRRKCVVQSVDEQQQLG

SEQ ID NO: 166321 - protein, 60 aa, Heterodera glycines
FVYFCDWFLIDRSIDHFSADRSFCPFAVPSLLLLSANCIVLGHNRRIGTRILFGNCLAPP

SEQ ID NO: 166322 - protein, 74 aa, Heterodera glycines
AAQTLDKREAHFCVLVKSCDEASFEKLVRSLCKEHIIPILEVEDKSKLCQMVGQCQYDKDGKARKILRCSVAVV

SEQ ID NO: 166323 - protein, 188 aa, Heterodera glycines
PIKMSSSVQRSLRPYIASSHQLNYHSEDNGGASAVNVCAELCAFLCANGFARAAKRRKTAPRIEENVTRDGNCLPAEMGNKKGRGVQLGLRSLLRFHNKRYTAPKSEEKTQRRLLVVLLDADFAKPIALRHVFALLALGPNSPSFFLLPGLSTSLSVPLNLPRISTVSFTSDGPPELVCLTAKIRKLL

SEQ ID NO: 166324 - protein, 106 aa, Heterodera glycines
EIFGAVMLILPFKTEQEAIARANATQFGLASGLCTTNLARAHRVAAQLKVGTVFVNTYNDAEVHIPFGGFKNSGHGRENCVECLHEYSQVKSVYVNIDEGLQHNLG

SEQ ID NO: 166325 - protein, 116 aa, Heterodera glycines
MSQKSAAPSSPRPFTSSVPVPLHRSASYSPSVLANANKFLSDRPQLIDCPRCKQHGFTELKHVIGLFTWVSFLVLLITGLFVLPLFFLWVPFFIDTFKDVEHRCPNCKTHIGTFRR

SEQ ID NO: 166326 - protein, 210 aa, Heterodera glycines
INVNDSVTKSKFDNLYGCRESLIDGIKRATDVMIAGKVSVVAGYGDVGKGCAAALKGMGSRVIVTEVDPINALQAAMEGYEVTTMEEACREGNIFVTTTGCRDIITGEHFIHMKDDSIVCNIGHFDIELDVAWLKANAKSHSNIKPQVDRYLLANGRHIILLAEGRLVNLGCATGHPSFVMSNSFSNQVLAQIALWNAKPNEFPIGVHML

SEQ ID NO: 166327 - protein, 168 aa, Heterodera glycines
SFPPFSTSSALSKNVAGKFYNRRHLLKKNETLRLTYDMLRRPHHIGNHKAWMAWNTQNLKEFEQQPGLTIAQDEIIRRFCRALFFEFLPEIAGPTELVIKRRGNCAFVTGFLCWNDRTVASQRKLYWLWGFTEEILSNLLKHPLKLELQFVRSLDHLIVANIAPASSV

SEQ ID NO: 166328 - protein, 82 aa, Heterodera glycines
SFVPAPPPIPPIPPPPVPLNAIQLSGVNGMPKKKGRRPIPSRSNATYISQASQDIYQSNLLSGGGISQISQSSQLSQPYFGD

SEQ ID NO: 166329 - protein, 184 aa, Heterodera glycines
IEPSIITMTASEIHCMMTAGFACIAGALFSAYIALGNCPIHLLSATLMNSAISLGISKLVYPEVEHSQHKEAEKMKFAERDNEETILECITASSIRTSHFAIAIGANLVTYIALLAFLNSTIGWLGSMVGIAELSFNKILGFCFFPLAWAMGVSDAQNTEVMLDETMKVAELMGIKTALNEFIA

SEQ ID NO: 166330 - protein, 182 aa, Heterodera glycines
  unsure (1)..(182): unsure at all Xaa locations
SEWERLSEKLRHXXNPIVFFDIAEGGAPIGRITMELFGDVTPKTAENFRQLCTGELKKDGVPIGYKNSQFHRVIKDFMVQGGDFVNGDGTGMTSIYGPKFADENFEVKHSEPGILSMANAGPDTNGCQFFITCNKCDFLDAKHVVFGRVLDGLLTVRKIENVPTVQNNKPKIPIVIEQCGEL

SEQ ID NO: 166331 - protein, 168 aa, Heterodera glycines
MPNKEEVPKGSEEKVQNEAEVPNVEGVPSEAGSASQPSLYSQFVTSFESVINSLVSDDVATRPQQKLPSLDLEGVAAFIREERPEIVFMVGAGVSTSAGIPDFRTPGTGLYDNLKQYDIPNPQAIFDINYFRRNPEPFFVLANALFHESIMPTSAHHFIRLVADKGLL

SEQ ID NO: 166332 - protein, 196 aa, Heterodera glycines
MDQNAPQFGIDVLPSCSSVDEQKPADQQSSAEIICFVRKDAIIRPSAPFGADFLHWKSSFWRERITSIKNVVAPMVDQSELAFRMMLRSHSAHLCYTPMIHAHLFVTDPTYRKASFTTVDTDRPLIVQFCANDPQTLLSACRLVEGKCDGVDLNLGCPQLIAKKGRYGAFLQESPELIESMISAVHRHCHLPISAK

SEQ ID NO: 166333 - protein, 19 aa, Heterodera glycines
NIYVFKKHEKYKRIHKNNT

SEQ ID NO: 166334 - protein, 50 aa, Heterodera glycines
SALALSSLAPPAIVCGCAACCYCQWHCCWSQKRRARSSTAAVVTVFAERF

SEQ ID NO: 166335 - protein, 164 aa, Heterodera glycines
LFSNVFEQEFVMESAGSSSQPILNRDLQILVGEQIFTGICGPGQYISNGFFNLFEAGPTVKSSVVSVLSKMTVFTMNECRAQISSPTDKRKFLCIDFRKSSGYLFLNKLVQIMNESKGKFFEVLHLICLKGVYIERLFDIFLMLNDLTIINLPYEFDSFSRNGE

SEQ ID NO: 166336 - protein, 140 aa, Heterodera glycines
PGVIDNGTGYTKMGYAGNSDPQYILPTAIATAPTAAGASGAGAAKNLASKRGIEDLDFFIGDEAMGNAKTYNLQYPIRHGQIDNWDLMERYWEQSIFKYLRCEPEDHHFLLTEPPLNAPENREYTAEIFFESFNVPGMYI

SEQ ID NO: 166337 - protein, 61 aa, Heterodera glycines
IFEKQFIRNVRLRLMEAPLQATSISCSDNTHRRPALRCIRNPTVRIPPLCLCCASPNPRIV

SEQ ID NO: 166338 - protein, 191 aa, Heterodera glycines
MDLCSEGLPIMPTSATANDPQIERDVAAPTKQWERRRHFGRDGTFPLSAVCPPIFSVAAFFLLLSLCLSAEVALAQDESRQKCLSAEASKSCGACVSASVECAWCSDLRFNGTQRCDAKWAFAENERCAVTQLYSPSTEIKVAPQHNLPLGVKRADGVTVIQLEPQQVEIRMKPGDIVEVPFRYLHKLPLS

SEQ ID NO: 166339 - protein, 145 aa, Heterodera glycines
QIPSGNSSSFPIVSAKTTQIHTDSNFRTTKMPTTLAKTTPFFIDPPSNERIIFNDPRRQMKKHNSSREMGKSDAKTSEKEDKREGGEGEQSAKKMNQTEPIQPTLNHEATIGPQHLAIRRIRYPQMMEQRTALFRPSAASPMGRP

SEQ ID NO: 166340 - protein, 50 aa, Heterodera glycines
DDSAEEMRLVKSRMKGIMAHIRANEQLFTQIVQSLQLNTHQRTVLEQILA

SEQ ID NO: 166341 - protein, 99 aa, Heterodera glycines
HHKIKNSQVFFVCFVVFPTSLSALSLTISSFFSLIIRLTSVFTFACLTADAFFGGTIDLKPFLGPLVGAPFCARFIDFCFAPAGKVVFFFIPCCAICAA

SEQ ID NO: 166342 - protein, 162 aa, Heterodera glycines
MISSAGLLNAETNPTEDTHQQKQTDEPKYAMPTNNVSSHVLDIAVGRPAEGVKCTAYKWKMSEQRSEKNVTGDEHDEEGGTWELWGQTETNEQGRIAIVHPGKALSEGIFKLHFRTKEYFEGQKRNTFYPFIEIVFQIDDPTAHYHVPITLSNFGYSTYKGQ

SEQ ID NO: 166343 - protein, 68 aa, Heterodera glycines
KMSMTWPKYLGSYITLQNAFRMTLAALIPAVAKMYEDSEVARLTRFRDRSAMFGRPPPPPGVEEIPSW

SEQ ID NO: 166344 - protein, 82 aa, Heterodera glycines
MVRDAMASPQCQDPLNSAILRWELPRQKDTTWSVLFERAQALADQFPVKLKKATDGLPQIVDFSLTQNSLEQVFMSLTNVDV

SEQ ID NO: 166345 - protein, 42 aa, Heterodera glycines
QERAKEHSHLIQLGAIFLGFLVINALQLYEQLTNSGHHHHHH

SEQ ID NO: 166346 - protein, 86 aa, Heterodera glycines
MKPSFNFKLFASVFLVLCVASLVLCEHKRAAAAEACNHPKSAGTGNLALKRWWWDGRHCKQFTYKGQGGNTNNFPSKKHCDQVCKP

SEQ ID NO: 166347 - protein, 157 aa, Heterodera glycines
  unsure (1)..(157): unsure at all Xaa locations
MVFWVFGYGSLVWNPGFDYDEKIIGFIKDYRRVFDLACIDHRGTPENPARTCTLEEKEGAICWGAAYCVRGGPEKEKLAMQYLERRECEYDRKTLVNFFKEGDSLHPTLTDVIVFTSTPDKVNNKYYLGPAPLEDMARQIATAYGPCXNNRDYIFLL

SEQ ID NO: 166348 - protein, 140 aa, Heterodera glycines
GAMTNMGSMKKERKKKSSPPPVQHANTINRCDTDSAGQHPHATSNALVLASTCCRCGVLPGIRPDSSPRPSSAAWSSFGPPRIESIHRVHDPDCAAGAGAGAETGGAGGGLVRACWKARKEDWNEDSAMVLIGRQALVCR

SEQ ID NO: 166349 - protein, 190 aa, Heterodera glycines
MSLCWPSHAIPKRFWSILWVDCRVRYAVLTFLFPNCSIPLVEPHLHSLLLTLLHHVLLVFICLFFVPMSRNRWKFNFQSFLLGVVNGWSIAFALVHSSRLHTVTFCIYAYFFSLFHFSEFLMTALTNVESLRPDSFLLDHSSAYWTAAICSWIEFWTRAWAFPTFCSLYISSIGVCCCICARIFSQIGNV

SEQ ID NO: 166350 - protein, 52 aa, Heterodera glycines
MTNEHFYDLLARAQKEPEPDYSNQFDAACAELLCKFKEGGKQLNHRVQKRMA

SEQ ID NO: 166351 - protein, 211 aa, Heterodera glycines
EAPSSVAVDDASFDYSAGGDELANKSTPRRRRGYIPYSTIYERQKGGYWVPGLQVEATIVHVERDVSSSYHILNPFIYTIELEHGRYKWRTIKRYKDFSALSSRLLAHRTAERIKAPVRRARNILEEVIEGNDDAEEEGKGEKPPHSQDNVLVRGLEFDESDERENGLRPDSTWDDLQGESSKTDEDLPMSSVPYFPMVPDSMIAEEHMEE

SEQ ID NO: 166352 - protein, 104 aa, Heterodera glycines
FYLWQYTQVISDLAFNLPIITELQHKLSRGWPIRFYIHGHVNEQSFPREVPIHESFHGNDLMSLFNSSVGQFPFNGPGKQIGQFLGGAFCRFVKRGNPSNLELF

SEQ ID NO: 166353 - protein, 157 aa, Heterodera glycines
FTTLLHFLLNLVALPISHTQIVCNMADSWQTETKDSDESGDRTNSAHQNESGNENWRLSAYQTQSTEEVPLPDDLSAIPVPTEHEMNPAWLIAQEALPSIGGRPDQHQQQHEQPQQFEGGSYEAAAALYGWPPTMGSSFNSYYHHQQQHMAYQDQQY

SEQ ID NO: 166354 - protein, 78 aa, Heterodera glycines
FFFLARAQILFKGGGSPPGALFQKKGPRGGKKGERPPPRGGFPPPNFFNIFSGGGGARIFNVLKWVLGPRLFLGETGL

SEQ ID NO: 166355 - protein, 193 aa, Heterodera glycines
MDVNAELPPDFEWYQNQIAGHLPSVIRNGVRQIGILHERGRTDVILKLVQEGIRGQREIGFYRRIAAICEGQGINCEETDEVEGTLLKELAMLIPRFYGCRQILLDENGPPKEFIQLEDVTEKFKCPCIMDVKMGRISADPLASEEKRMAEEVKSPLQKKIGFRILGHRVQNEDGLQISRERIWGRERTEENI

SEQ ID NO: 166356 - protein, 205 aa, Heterodera glycines
MNEHLRAENARLIQQQVNNVSSSSATSSAAGGSGGGIALPSANHPFVSPTSLVPQLEAANSFWQAVVGISSSSGSGGVGTTNDGNYAAGHQQQAVATSSALLFNRATTLTPAGIGSSSAADDDSKVGSSSRSAKLKRELRFHCDWPGCAYATAYGGDLNKHKRKHTGERPYQCDQCHATFGQHSSLSAHRYTHSDMKRFHCPQCE

SEQ ID NO: 166357 - protein, 38 aa, Heterodera glycines
TGRQKGIVTEETFALKDNDVINNNHTLVIFTNKSTNLV

SEQ ID NO: 166358 - protein, 155 aa, Heterodera glycines
TDPIKANQDAQRLWRAGEARLGTDEIAFNSILAVQNFAQLRMVFDEYQRQHGHSIEQAISNEFSGDIRDANLALVKSIRNRASYFAELLHNSMKGIGTRDTDLIRLVVTRSEVDLADIRQAYQNMYGTSLENAIASDCSGAYKDGLVAIVKGYYH

SEQ ID NO: 166359 - protein, 203 aa, Heterodera glycines
GLLIAKMCKKSFNKLLNSQKCSLALFIRHFFRFPTKFCQKISDQFMQNAITAEALSSLASPVHCFSTPMALAFIDHLRNEKQQNIVFVDAFTWLRWHFQCDRPYELSFTSSINSSDGIIDHFSRICFVRPFPFALLNFRFAILSPFTAFNLFGISTIGNEFTNVFLVNAICVESSPKFAPSFHVKLIDQHINSFPFECPLEPE

SEQ ID NO: 166360 - protein, 153 aa, Heterodera glycines
VFLFRRDLKQIFAALNVTISDTEQRDIEREYEKMKVIGNPKEMREEKPNERTHLLSEFEDEHMAKNNGGGQFGTKETVTAPIAEGGKGEEGTEASSNCNTTTTQWGTTGMSSDCNTTTAAAAQLEWHNEAEEQRTKNQLAKGKEEGDSGVIVP

SEQ ID NO: 166361 - protein, 112 aa, Heterodera glycines
AELHFGKVTNRLPALRGLGTEPRRSFALQKCCRFCPTPVLHGLEWSSECAPNCPVLESFVPLYRRGEKTVPKCVVNGQEKSQRRSPSSSCPPPPPPFAAVLVRPAFRQNSNP

SEQ ID NO: 166362 - protein, 198 aa, Heterodera glycines
MYYSLSQIENHLFLNSRDLNPNMAAGASTSRNLLNVASVEIAAQNECFTVWEPLQLRQEWTISNFAKALDLATPGICMRSKNFRDESMPEICWQLCLYPGGKREENSGNVSLFLKMSTTQSQREFTVRAEYHFYFVDEQGIAKFSNVNTGDFKVKPSKGSHSWGLRNIPRTKVKSCIRPDLSLHIVCQIELVPDFSKV

SEQ ID NO: 166363 - protein, 145 aa, Heterodera glycines
MSTLRFTPNPADAPTSHTLPGTHPEFSVHDAFRHGLHSVKHEVGAVAHHPLEPVLAQADQFAMQRKLTLQRQVYGLHAPLRVQMERSLLALKHQSPVFKSVNLGLEVMAGKDESIDVEDVLGDRDECVDDVDFHAVMERKLKIKV

SEQ ID NO: 166364 - protein, 132 aa, Heterodera glycines
LSVVNHALQLPFVPTQCHDTLRAAVRIYLAWASALTASPHDCCPKHLLAHPDRYFRKILEALRHVFLDRPSAAHPSEFALCLSRQGAQIRIILNTVQHINATVVVEFKDECWSRSLLFLINTTDQLLSIGGS

SEQ ID NO: 166365 - protein, 176 aa, Heterodera glycines
  unsure (1)..(176): unsure at all Xaa locations
ACHIGLKILGTQFLKVQKTDQSVGWSSVFATCCVPAESAGIFYFEVRIFHVLSCFTIGLATKQMPLAPQLAVPEHNSSSAPASXSRWHHPFVCIKPTQQGPTTLTTKRTTEFLCGDIVGFGIELANRRIFVTKNGRRLVIADLFFSAAQPLFPFVSLRDFGATIEANFGPNFKFNP

SEQ ID NO: 166366 - protein, 141 aa, Heterodera glycines
FNLEWIRILVWCWNFNLASDPPPPILGCTYTSNSLRHFCRCVLCVVLVLCPCTHAKHAPPKPLPSLIFLTSHLSISIFFTCQQFACSHQCLFYSDLGDGCGAEALSLSEGMGFVRIGWLCCKKATTAGGGWPAKDVVPASN

SEQ ID NO: 166367 - protein, 202 aa, Heterodera glycines
MGKTSKDKRDIYYRLAKEEGWRARSAYKLLQIDEICKIFDGVFRVVDLCAAPGSWSQVLSKKLYVSEKDEEKRKRVKIVAVDLQPMAPLPGVIQLQGDITEVGTAQQIISYFDGSLAQLVVCDGAPDVTGLHAFDEYMQSQLVYSAFSITSHILQNGGTFVSKIFRAKNVNLLYAQMKCFFKEVSCCKPKSSRLSSCEAFIV

SEQ ID NO: 166368 - protein, 101 aa, Heterodera glycines
HNGTGTNIGSGTGNSHNGTGTLALRRPWGCPPLVRNVDRRRPRRSRKRTRGSYSDNSDGSAFTLFHGMHGSFDTWGTAGIDEWDQSAQSVHNYAMELMTLP

SEQ ID NO: 166369 - protein, 120 aa, Heterodera glycines
MHCWGDQIVRESGVIGTVGQHRDEWHKKGGTFGAKRTCSFGPNSVARKLQKPLGPGRSGGVNDTDNSGTAKGEHYQTVTGITLSVPHVVGKLFSWQFVFLFDDRLQLHNCNKKISRNIYL

SEQ ID NO: 166370 - protein, 43 aa, Heterodera glycines; identical to SEQ ID NO: 155978

SEQ ID NO: 166371 - protein, 105 aa, Heterodera glycines
  unsure (1)..(105): unsure at all Xaa locations
MVVAASRFGRPLVRSQQQLVNNIQIKDLMVGEECSELRHMLDVSYPMENGIVRNWDDMGHLWDYTFGPEKXEPPLNPNSNREKMFQVMFEQYGFHAIYIAIQVEP

SEQ ID NO: 166372 - protein, 139 aa, Heterodera glycines
RRNWAHQNVPFPGSVKPVYGARYPPLQSSNESNETPAKTDNKFKNYEESVSDVWDPGVPVDDSLVLSAAAKVLERHAADFQTSGQSAGGTAMSQRHNAVMPVHYPSVPSRHSKMQAMQRLATQREPIPGVNPLPSSANS

SEQ ID NO: 166373 - protein, 196 aa, Heterodera glycines
MNRRWICGDVWMDILPSFDHAQLGLKMALLSDRFDVLVDKHFDRKSELTIWRQIKISKDKGPKAKLSVEIGAKFVAFPLPNHSLPNKICFKDLRIDYIDHSVFAFLRSNKPILDRMGTKLEVFVHAIDTDVQPIWDVFIRQIWPLFAQNIHHLGFLDGDDLDNLCRRTSPTILTDLDQLISIDSGALFSDGIADDG

SEQ ID NO: 166374 - protein, 162 aa, Heterodera glycines
  unsure (1)..(162): unsure at all Xaa locations
VCSLLAIITTDFHSDLLCYSDDRAQVNVGLRHTIEAFHFNTDSAXTDLMGLAXSCLPLANPRESPFNSLFIAKHPLPXDTDLLRHRPXRHNCPPDQPLAVAGPPGHSGFPPRTGQPLLSVQPVKAPPPCPTIIIRCLLCFDKSTRAPGGRGLLGQTCNASVP

SEQ ID NO: 166375 - protein, 70 aa, Heterodera glycines; identical to SEQ ID NO: 143743

SEQ ID NO: 166376 - protein, 198 aa, Heterodera glycines
MMTPHQDFHNSSVAMQQQQTLCPPESTLWMGDLKPEWDANFVREAFGENAGDVTNVKMRSTYCFVEFRDGPTARTAMLRVNGMTLPNDPSGTSRFNLAFANSPHHMSIEYNLFVNNLAPDVDDVALFRLFGERYMSCRGAKVYRNEDGASKEQGFVRFTSETDQQKALVELNKHKFHGRDLFLKLARPKTRGGPAEKR

SEQ ID NO: 166377 - protein, 182 aa, Heterodera glycines
LKPFVFLFLILSSTKYICPNKHKDIRDYTDADIEKLYDQWEENDEDELPEDEKPPCQRKRPQIDLESLQQRTDSPDELLKLTKSGQTVMMFVSVKDQKSEGKTSKDFTDKISSLWLSNFHNNHIDAKVFIVDNDRVLYMFSEGSQAWDARDFLLSQPECVEVVLEGKTMAGKGSKEGKHTEF

SEQ ID NO: 166378 - protein, 204 aa, Heterodera glycines
SPEFLIFGRLILGANMGLSTGLVPMYLMEITPTKYRGAAGTFHMVAVAFSDWFSLLLGLPEVLGSADNWPLAFAFPGFPAFLLCLVLPFCPESPKYTLFARGDHAKAMEDLKKLVDEDEAEFMYESLQSEAALMQDGSCCTFRQIFFEREFRLPLLITIVVMVTQQFTGCSAVFAYSTDMFIDAGLDPRTARFSTLAVGVAYFL

SEQ ID NO: 166379 - protein, 178 aa, Heterodera glycines
MTGPPLSRKRRGAVPTRIEQLERMLDMTKFIDQLKRLIDQPIKIPGTLSIGPGQARNKQIPGKAKRDLLFFEDIWSERADRMADTSALYNTSDIGERKWLLDLLMEESDPDSGGEEHITEQDLKEIVKIHHKRRKFQKEYHSDLTNSQYTYYGAGLISAFDRFSENQKNVRKEFEVGT

SEQ ID NO: 166380 - protein, 109 aa, Heterodera glycines
  unsure (1)..(109): unsure at all Xaa locations
FFFFFFFXYFESFTENGDRNAFGWNTKTLLFARTELLRLLLLLGANCDPPAFACCGLGFGENLEPATFDWNSFGAGCGDPDFTKMFASKLANVSYFESFSFSYSNRSIG

SEQ ID NO: 166381 - protein, 181 aa, Heterodera glycines
MSAAAAAPMDPRNQADSVSVASILDNVDLAAASKSLSPVGQLGSGVEYIFTNDVPFTGASGGFVPSRGWTDDLCYGTGTAYLSGLMVGGAWGFFQGLRTPLEIRSTKLRINAVLNGMTRRGPFVGNSVGMLAMIYNGLNSAISSQVEPQHKPVASIAAAAAAGALFKSTAGLRPMAITSLA

SEQ ID NO: 166382 - protein, 164 aa, Heterodera glycines
VAGLLKYAAEYTFFLAPFINSYKRLQPNSWAPTKICWTVDNRTSSFRLCGQSSSNVHIECRIGGADLNPYLAFAALIAAGIAGIEEGLELPKAVACNVYASADAIPELPKSLRIAAELMANSEMLKRALGENVLRHYKNSACIELEDFEKEVTDWELRRAFDRC

SEQ ID NO: 166383 - protein, 165 aa, Heterodera glycines
SEDKGRVFGASHVPLPTMDEEAREQKIKELIAMTEETHRKRAERKRQRNEEEAEERRRLNRVRARMGLEPIPSSEDEEEEQKGAAEATELDVSAIPLPPSSPEAKTTKEPEQKKQRFGVREWDRGKIGCMRWAEEQRDEREDEFAPPSFYYGEENDARGKKKRKN

SEQ ID NO: 166384 - protein, 206 aa, Heterodera glycines
VAKLMTPEELTNPNVDEKSVMTYLSQFPRARPLYSASTRAPLEQQDSEGTTLDDSNQSDIPVPAIQPFSFDEEPLDNVGEECQQLTLSQMDDDDNNGVTTALTCVTKTTTSYTIGQQNEADDEFPNEPSLPTDMENIPQQNHQLYNLMVCESDLNDGIAETAAEPTTDFDAVRMTYRHEELQYEPLVVVSDEETVALGTTAVRPQP

SEQ ID NO: 166385 - protein, 140 aa, Heterodera glycines
MMVLKSNIQRDKVRHNRFKLPERSHEDLFREKVRTGPAMKSLYENDELIDVRGGDGTALIMSDFDGFVPQLTKNIAEKGIERPTLIQKCVMPIILTKSEFDLLARAETGTGKTAAFLFPIIHLLESDRLAIGTKPSTGRK

SEQ ID NO: 166386 - protein, 104 aa, Heterodera glycines
FFFFFFFASVFYYQFHPTFPNQQINSFLPFFALLLRFTLSSSPKWAKLVLCSPHFRPFFLCSSVFPFLFFSTDLSRCPFASPPFCWANTQSEPFSRARNVSYSN

SEQ ID NO: 166387 - protein, 41 aa, Heterodera glycines
HHKNAPPPAPDGDPPPPPPPGPPPPPPPPPPPGGGGRFSPR

SEQ ID NO: 166388 - protein, 184 aa, Heterodera glycines
MKPTAFLTATATATATACLLLLSCTGPAAAMPHPDPHPHPQNDCKACIEMIPACPACPAGELCARSSNTCQECASARCFKLAELAQLPPGFAPALGQQQPGTFTFPPMPTMSGGTVFSTSIGMTVINGTTVTPTATATPDTSSVSLTAPPTASPTGTQGAAGTGNGAGKSSGSSAAMALVVACV

SEQ ID NO: 166389 - protein, 65 aa, Heterodera glycines
RIYVGHIPYEARERDVERFFKGYGRIHDILIKRGYAFVELDYPRDADDAAYDLNGRSLMGMRVLD

SEQ ID NO: 166390 - protein, 91 aa, Heterodera glycines
  unsure (1)..(91): unsure at all Xaa locations
QGAPIAFPRHSCTSGNECLVDSHCNGTICACRXGLLTLRIADSHNCVPGDPRKTRSTNNNGGLVIAFNPNNETDGSDSAAHNEQNVCVTTN

SEQ ID NO: 166391 - protein, 170 aa, Heterodera glycines
STTSSASVVSVQLREVPIKDFKDVLPVLQKTLNELEHPFIKKAEEISGMEREKLFYITSSLVLLVLMLCPGNMLLSTLITVAYPMYASLLTLNTQNTSEYTQWLVYWCVFAEFCQFDYLFGSINGLLLLYVPLKTVFLLYLALPQTYGAHNLYVKHIRKVLAVTNVLDKM

SEQ ID NO: 166392 - protein, 152 aa, Heterodera glycines
MDRPFIMRSDGSALAVLRSPDRSLGGDALWHLCDGVPPTPFVSPTELGFTVFKHLCLSPDQRALYCLASGPRRASSLIRLDLSTDCHTVAVIREARAHSELSQLPLSVSSLITFTANGHSLEGYFYAPHSHTHCAPEGKLPPVVLFVHGGTT

SEQ ID NO: 166393 - protein, 128 aa, Heterodera glycines
FIFNNFLFHFCRQNFVQPGFSLSFFNPFICFFRFCLRIHAQVGGCWPSSKSLSAFNVSSWHSIFFCAGKQSRREEPIGSSVKHLSWFSMPKYFGGNAATPPTHLSTQPMSKRIQKTNGKLKKDFIFYQ

SEQ ID NO: 166394 - protein, 121 aa, Heterodera glycines
ASDQTTNGLVLLLFTDGTGGCCLIRLFMSTSLVNASSNVRTREAASSHLNWSPSNVPPPAAAAAMPLLLWLLLVTPLLPFCQRCAVPPPLLFIIIIAMKLDGSAAAAEAALSNSNDPAEAA

SEQ ID NO: 166395 - protein, 83 aa, Heterodera glycines
  unsure (1)..(83): unsure at all Xaa locations
CSLLAIIATVITLASLNSETYQMNLKVCAGVEAFRVHTDSTWTDLMDLRVVVTPATKPRDNPFNSVFFVXRPLPGLCQCSGLQ

SEQ ID NO: 166396 - protein, 78 aa, Heterodera glycines
MQETHIVLGIASVCSLLAIIATVVTLPSLYSEMSQMNSKVRDGVEAFRVNTDSAWTDLMDVQVVVTPPSKPRDNPFKA

SEQ ID NO: 166397 - protein, 146 aa, Heterodera glycines
IIAKVNFIVIGGCYLSVICRGRLIVGCCAELFDEYGIWSLSVAPFENGQFAERPFCVATDKRREEKACDGEHSIQMFVDKSAEGVEIRDNSAQFCADGGQFRRFRCACDGEQFGPQVLHFGGQCPFGPFLVQISSHFRRGLSVFPF

SEQ ID NO: 166398 - protein, 89 aa, Heterodera glycines
ALYFLYQDKYIQYMCTQNIHAKSVTKNQTSADRKYIIYEMIMIRDNSIQVAIVLRAHLLVIRSLNSFSARSVPRNGRSRIRKHRSNFVI

SEQ ID NO: 166399 - protein, 171 aa, Heterodera glycines
MGPLFSVRHLPLVLLLVLLLPSFLLSGMVNVCSDVKDCANCTRSFLNIFAFREYCMWCYSTNSCGGPLVCPSGVAVATRDPFKCPQKASTAKGRRYTDKLGRSLYALTLAAKQKDPSYCLKNSRSDVKVIKYYEVECDQAKNTCAGMIAVSEEAKALYIIYRDSTIDRQLL

SEQ ID NO: 166400 - protein, 53 aa, Heterodera glycines
QSSCGLPPKQGLSGPNVGLALQGGEGQPRRPAKPDRPVPTCPPQNIPCPRCPA

SEQ ID NO: 166401 - protein, 76 aa, Heterodera glycines
LYAENSKIADSLLAAHIDRSNQKGTINFCCIASKWDHLRALGTLRTRPIYRRHTRVVPSNIKYEKLFAMNVGINIF

SEQ ID NO: 166402 - protein, 153 aa, Heterodera glycines
MGAKANNKRNGRVQYEPAKDFRGKMLELVYWRDPQKSGAVLASLFLCVYVFQHFSVLSVLINGALCLLLATVGFRVFKLAEAHFKKLPDASANPYQQYLDMEVAVPMDKLHHHVDLAVEYALFLAKKIRHIYLSDALLDSIKFGLILHSLSYV

SEQ ID NO: 166403 - protein, 60 aa, Heterodera glycines
RNLRRASASNNAKYPVDAAAVGGAVMGGPVGIAAGSLVAGIAAAVRGAFAGLYGGRVLKR

SEQ ID NO: 166404 - protein, 176 aa, Heterodera glycines
IAGEVEGNKVKELKAKEGEEEKAVDNGDESVEDDRAFGTKTPPASQLRQTPPLSASIRAPTVRKRCSAVFGARTSHTSTSGGGGGGLSALTSAMLGKKPRKQSVLDNAQSGWRSFVQEEQLEQEMESHMRSKDAYLDKQEFLLRADYSQFERERDLRAQERRVQQQQQANSGSKPR

SEQ ID NO: 166405 - protein, 129 aa, Heterodera glycines
RVVQQKACLHLPPLPTTTIGSFPQRATVRAMLALFQAHKTADADYWAFINADTDRCIQMQDDIGLDVLVHSEFERHDMGEYFAEHLHGFCVTSNGWAQCYGSRCVKPPVLYGDVLKAGPKTVEMTQFAQ

SEQ ID NO: 166406 - protein, 93 aa, Heterodera glycines
LFYNNNSAFLIFLVIIFFSISLHSLSSLLFMVVPCPPPPFPCNCLIPKIPAQLTTPNQCLSPIYMISFVSSLPCSLNGTLRDDNLLFPEFNFR

SEQ ID NO: 166407 - protein, 172 aa, Heterodera glycines
FVVTERSPTHQIQIYNQYGQFIRKFGASILQHPRGVCVDSQGRIVVVECKVMRVLIFDMFFYILHKFSCSRYLEFPNGVCTTDKEEILISDNRAHSIKVFNYEGQFLRQIGGEGVTNYPIGVGINQLGEIVVADNHNNFNLTVFSQDGTLLSAFESKVKHAQCYDVALIDDS

SEQ ID NO: 166408 - protein, 154 aa, Heterodera glycines
MTNAEAELPDNAPKRRFINRGINRVELLGGVGGQPVVKQTAQGSAFASFNLYTNVDRRLSSGGTMTSTEVHNVIAFGVMARYVEKNVDRGTRVYLTGRLHYTGGQLNADGSRSPRICSVNLESIYPLSKPGAMYSLCGGGGGASREGADDGLKD

SEQ ID NO: 166409 - protein, 127 aa, Heterodera glycines
  unsure (1)..(127): unsure at all Xaa locations
YLNKPTPIAILADKVNMLDTKLEDVLYTGFNWANMHQSRLSVVAISNTLDLXNGFFSQRIARPMGNNRLNFQPYEFKEIEEIIRGRLTECPEGAFDPKAIELASKKVAAISGDLHKAFELIRRGIDI

SEQ ID NO: 166410 - protein, 202 aa, Heterodera glycines
MSALPSPLLAFATSIRFCTSTRQNLKINQNTKVVVQGFTGKQGTFHGQQMIEYGTNVVAGVSPSKAGTEHFLKPIFATVKDARKKTGADASVIYVPAPFAAAAIDEAIDAEIPLVVCITEGIPQLDMVRVKNRLLKQNRTRLLGPNCPGIIAPGECKIGIMPGHIHEKGVIGIVSRSGTLTYEAVQQTTETGLGQTLCVGIG

SEQ ID NO: 166411 - protein, 187 aa, Heterodera glycines
AVIKWAPRKIREPLKAERQSLRPVAFAATCWATVAITSCLIIFPLIVHYIQTLEANVQLDLDFCKSRARDMFKEMFEIKTGGKGGEAAAARLANMAIQRRQLEKRDTLGDYWSRRLHDMALRDDPVDERAEGIGGRLGGSGGGATSPQAPTTGGVAKTAVTSNASKIGGTSSTRGGSSSSKESAPRA

SEQ ID NO: 166412 - protein, 57 aa, Heterodera glycines; identical to SEQ ID NO: 131660

SEQ ID NO: 166413 - protein, 176 aa, Heterodera glycines
MTDKREKKPSAQPQQQQHEDGAVQQQKGKGTNAKMAFDDEEELQDEETEQFYQQFAGSTTSSKLAAKSKKFSEDERNKYVGQFSVVMGMLQNVNHIEFDKTLARLSTNGDYRKAFPSAADLLAFITVNCPNIKAIKVSKQDVALLWSERSDELVSLLLQHVGKVILKKSVGKAYDY

SEQ ID NO: 166414 - protein, 191 aa, Heterodera glycines
LTNWTSADSRPFISFASSSEQFAMDAPARPLPLPKSATVGAKRRFLRHRIGRIFRLKHSEPRIYNWHLPSPTVVFVVCVGIVLLVPLGQREYHQWNFLRFRERFNSSCSLPEQFSCSSGVSFVICDCCRRWCASLSEKFARPPFLECVQSIGRQFEFIKVHAINKLGNDQKQNGQKGQKGRRSAKDGRECH

SEQ ID NO: 166415 - protein, 191 aa, Heterodera glycines
MSFKLILLIAVPMFVICCAILLKYWDRLKKPPKQQRDHRKIERVPEIVLTICSDEMSSDNQNEAEAKMAKAIFISADCWLCVFDLLTPSQLGHGIAMISHRFDFYVDEHFKTRKWTLKPIQIEITIGENGTKEMEIVNDDGEALPIPKMKMPRKVIGFKRIEISFIDKNVIAFLHRFGQLFAVCPINLFIG

SEQ ID NO: 166416 - protein, 167 aa, Heterodera glycines
  unsure (1)..(167): unsure at all Xaa locations
EKPGHVLKGREENIDRKKHIFKLAQGEYVAPEKXIKSVYVQCPLVQQVYVDGDSLERNLVAIVVPPEKTLKRLYKELHGTAQNGDLEKRFQEICTDKKIVEAVLKQMQQMGKEQKLSSIEQVKAIFLEVEPFSVENGLLTPTLKSKRPQLRQKYREQIAALYRTGEK

SEQ ID NO: 166417 - protein, 128 aa, Heterodera glycines
FRPTPGPRWREEDGLEIEVTHKIEESACRRSAPGDTIHQHYTLNLADGTFIDSSFSRSKPFIFRLHHGEVIAGMDRAMTSMCEGERRRVVIPAALGYGGQGRDNIPRRRHSLLLTLSCANLIKPTAEE

SEQ ID NO: 166418 - protein, 127 aa, Heterodera glycines
  unsure (1)..(127): unsure at all Xaa locations
YYIFFAKLQLPRRLSTQRGLQHSRCSPGSSGPFGPPGQPGTFCEAHDRPDSAGQPGKTAPPXPTKKIPWPHWPAGPPCRLGETGPPGEQREPAKPVTPDYGGGPVTPRAAGPQGQSVLPGLPRGSGQ

SEQ ID NO: 166419 - protein, 191 aa, Heterodera glycines
NVNKLRSVLIGQEVTESSGAGPEAADTSGGSSRSGGHSPAFSPQLVRPHFEFVDLGGGSFIKVVSSEACALLSALTELIKKGEPEDVLLERVPLLLATLLQVLAALVDTQYSSAQKHAVVPERDATVGNGNGRKRRFRLIDDDHSMPTISEQQRHSFIITDCSKFCCYCCGFNDAVYAHNGFRRRCNAITY

SEQ ID NO: 166420 - protein, 149 aa, Heterodera glycines
  unsure (1)..(149): unsure at all Xaa locations
HIVLWIASVCSLVNIIATVGTLPSLYSEMRQMNNKVRDGLEGFGVNTDSSCTDLMDVQVDMTPTSKPRDNPFNSIFFVKRQLAGHCQCACLPLVRCRTXPPRPDXLPGTAGPDGRGRTGREGXQGQPGSPLSGWTKMVPLAPFGPRGKP

SEQ ID NO: 166421 - protein, 62 aa, Heterodera glycines
  unsure (1)..(62): unsure at all Xaa locations
EMSQMNSKVRDGDEAFPRSTDSAWPDLMDVHPAATPPXKPRDHPCDSIFFAKRXLSGNCQCA

SEQ ID NO: 166422 - protein, 77 aa, Heterodera glycines
  unsure (1)..(77): unsure at all Xaa locations
STCSLMGIWATRMDLASVLSERTPMNTRVHDXIHVFHSNACSNWTDLMDVQVAVTSTTECRDKPFNSILGARSLLPS

SEQ ID NO: 166423 - protein, 80 aa, Heterodera glycines
FSVASICPFLSLCLSSAPLALIRFVFFVCVRSNGCPRADQCPGDQSGRFNAPFSSSNCFRLRWRQSLRRCRPPAQHQLGL

SEQ ID NO: 166424 - protein, 46 aa, Heterodera glycines
TERTELMDVQVVETTPRKTRDNPFNSIFCAKRRMSGHCQCAGLKQP

SEQ ID NO: 166425 - protein, 79 aa, Heterodera glycines
MALNRSHLLTFDVNSLIAIYSLSLSLENDQSADSLSLECLAEIRIAEFLPHPNCLVSMDQTRLNFYSDAVPFCDDLDSL

SEQ ID NO: 166426 - protein, 200 aa, Heterodera glycines
FKMSDEIKELKAITLQILKNQTLMIAHLVNQARQNKPQQHVQPPLMLKQVKTEPCEPPSTVSKRKAPSAVEQPLNEISFINKNNGGCATVNKRRRMSAPNTAGMATKQNNTKFCKICDAVVDENSLVSHIWEHILKKMMKEKADLSNAYSFVCDVNGCVFRTNKLEAAGGHAIKHPEVERNKVVLDNRENSEPLFLATLA

SEQ ID NO: 166427 - protein, 117 aa, Heterodera glycines
  unsure (1)..(117): unsure at all Xaa locations
RTRPDRVQAFRPSPSLPGMPCMDVQGVERTPTKGRDNPLPSNFRALCCLPAHCQCPGLRRAGCPPGPPXPTGPDGQSGHPGGGGPPGHSEDPGHPTPRXSSQNVPRPRXPARAPGRP

SEQ ID NO: 166428 - protein, 103 aa, Heterodera glycines
QSSWRLQPKQGLFGAEVGMPLEGLESPRTWTTLSNLRLGTCFSKRVAFCRLTWKCVTFSTIQIRQLLFKTTLTQFPIVSTTVVTFWSDDSQKLKTQPCQFFEF

SEQ ID NO: 166429 - protein, 62 aa, Heterodera glycines
RTRENGQPGQSGNPGPQGYPGDGGSPGQPGNPGGSCEPGQPGAQGSSGQCYHCPCYNTAPGY

SEQ ID NO: 166430 - protein, 192 aa, Heterodera glycines
RNGKRDLHLCRLLAQSVRFAAALSGLGIAMISRRFDYYVDEHFKTRKWTLGVMKIQSKIVQNGAKKMEIVNSDGKELPIPQNPLPNKVIGFRNIWIFFLDHNVLIFLRHFHRFFPTCATKLEVETENVRVSEFLLLNIWPMLKDTIREMSLDDFNRRQIRQLAPSMLNDCQSLISVTFYGPIYPEFPPDDSA

SEQ ID NO: 166431 - protein, 119 aa, Heterodera glycines
  unsure (1)..(119): unsure at all Xaa locations
VGIASHCSVVAILDTLVVIPQLCPTIYEMNNRVXDGVXAFRVQTDSAWTEMMLVHISVTPPTHLREHPFNSIFLRASFYGIASPMRFRDCSISCPSWSMPGAVWARPRHPGRATGGVGG

SEQ ID NO: 166432 - protein, 190 aa, Heterodera glycines
MRIYFCLIFYFCCFSLLVCRPKKAKTKKPKNKKFDYNKLRDPDRKGCYGGTADFHYFGNKSEAVDNSKCIRWLSVTKWIMHQFRGYQLYYFADEFTEHNHCRNIDLTIYTPNPKLSNASAHLFLGYDEQIAKGPWCYVEKKGDMPEHLTAKWKGYHLTDPGNSKKTIRFPDKINQLKMKYEPKPCFKMCK

SEQ ID NO: 166433 - protein, 161 aa, Heterodera glycines
MDESAKKTLKQIPLLKTNAGPRDGPLWLERLKEEYNSLIAFIEHNKQGDADWFRLESSADGTRWFGKCWTYHNKIKYEFDVEFDVPITYPKTAPEIALPELDGKTAKMYRGGKICLSDHFKPLWARNVPKFGIAHAFSLGLGPWMAVEIPDLIERGVLTLK

SEQ ID NO: 166434 - protein, 193 aa, Heterodera glycines
VNFVLALNVPMSVLLREAVVERLVEPAWAAMSMSPKELLSRQLMPKIGKATGLRPSLNSDLTLTVTLENDEFVQSDFDFLVLYFPDEFMRGHAPKRRRRGGGSRTPNSGGTNVVVEDHAVVDMASSLLTKMKIKAARDQMSRAVANIFKFSPASLPCTCKSVTLERLPLFIGGRYCKYSRALPQSPWIGASDE

SEQ ID NO: 166435 - protein, 120 aa, Heterodera glycines
  unsure (1)..(120): unsure at all Xaa locations
MEKTLXSFPLLKTNAGPRDGPLWLERXKEEYNSLIAFIEHNKQGDADWFRLESSFFXFTRWFGKCWTYHINTPYEFHVEFDVPMTYPKTAPKIALPELDGKTAKMYRGGKICLSDHFKPL

SEQ ID NO: 166436 - protein, 210 aa, Heterodera glycines
SLRSPDPRICAKFACDGTTDPIRNGQSSLFQQRRNYENVNSTTFCAPATEEIEEDGICKTDDDSFNDYEFFHPRQTTCSTIRGEEAEAKREKKGTEDNNNLSSSSSVSTITAMTRTKTLPNGAKQHEEGHKKRSLHQEPLSRKKSSNQVLERSSLISSPSSDHTELEVFHPSDCSLAPSSSSCSSSDSLENHRQSRHCPELANNLQSQSH

SEQ ID NO: 166437 - protein, 170 aa, Heterodera glycines
DACDVTAVTNARFKDQCLVQKCNFSHFDTPSDRTATQRLRSSELIAIMVDRRRRKSDDHFDQKQCLVSNWVSDLIFRNRSLSGSNLLMFLGSCTSSTDLLGSIHTISPQLNQTVYSEAQRGNLYSLRGEREFQTQMSDFPAPNSTPRVTIPTIFDFLCELELESISKLRF

SEQ ID NO: 166438 - protein, 59 aa, Heterodera glycines
IYNDREGVNLANGEKNLSRHRRHHHHHTAPPIDKFCDQKVPCALFRADGGGAARRRRRF

SEQ ID NO: 166439 - protein, 146 aa, Heterodera glycines
  unsure (1)..(146): unsure at all Xaa locations
MDDEELEDESESDEEEEQQMVKSLKAGTPTVAQTQQQIANAKSAVPSKKEQLSTQTDKYKGIAAEEERRRAERDKVTLFXRCETLQKMTDGEIKALHPDALAVRTNNRAFCWMVFASEPTADKAFAVLSKKGRIGGKELYVDKCGT

SEQ ID NO: 166440 - protein, 123 aa, Heterodera glycines
SGGNECLRPCHSTQEYAQVNLNIAGYTVRSLIYFVDDSEFTVARDYSVIVGWDVFEKLPPIKFDHLNGKFFVGDNESKLCYRSILTERFARVGREKHTHSGRLPNIGRCFNRIIPKPKKFILH

SEQ ID NO: 166441 - protein, 136 aa, Heterodera glycines
AAQGQPTRQKKFAEVKTWHGGYISNFLNLFTERDKRTATKHSPYVQRYIDKVLALNRSLSQTTTPPAPTNPPWTTTTNPPRTTTTNPPRTTATITKTRSTIWSTKATTRPNAWTTTTTPMSRTMDYRTTTAAHSGN

SEQ ID NO: 166442 - protein, 141 aa, Heterodera glycines
KRGNERRSGVPERRRWRCWWRSRKDCSISKTLGRSSTRGNSLCSAFGWNVKYCCCCCFCRSSPPSRRKVPPFASANVCLCWVAYLFSWMPIGSRSPPPPPCCSVTAFADGKKVPEGRGRRWQTGNERGEAQQQHWSAAQRR

SEQ ID NO: 166443 - protein, 193 aa, Heterodera glycines
ERWLRSGLSQEKADADNDYDLNLDGTTLNEFAAAVGLFYLTMFDGKLAHLSADGIRSMDRPLSEWMYEPSPLMFSERIDGIFRFLLRQPGLMPGLHMSGELRDKLFRQGGPHGLDLAALIVQMGRDHGLPGYTRVREACGEMPQVKSFDDLAEIVVEPKRILPILARHFRRVQDVDLFLLGLAERPRRGALVG

SEQ ID NO: 166444 - protein, 61 aa, Heterodera glycines
RRFLSKLSTPKVSSPPEKVLLLFCCCCCFSLASFRSNGISAQLLSFWSSTCRPNSDGGGER

SEQ ID NO: 166445 - protein, 73 aa, Heterodera glycines
VSQQKGVSQREVAKFPVFPSNNIFIHFFKMYVNPKNILFLLQKYFKKYNEETSLNDPEIAIAKNFASEIERCL

SEQ ID NO: 166446 - protein, 149 aa, Heterodera glycines
VPINYLSSFDLAMSLALCAAPFFLFALSSASPPFLATFNGCPQLIDGQLLDFVNSGGIRLTKSKTGNCDRLISCDLIGAPVELTKVEWYVNGRKIQRTNEGTEREETAENAQSENERTERSAIGVGEVSHRFCADNWLVDEPSLNENGM

SEQ ID NO: 166447 - protein, 101 aa, Heterodera glycines
NSGSLPPFPRFFPSLPFPPLFYLPFPSLSFPLLSPRFSLLPFSPPFSWQIKAFPSINFSFPILIAEGCQPPFRCPPLFSFSDSDCERFFRFSIHSPLYTGG

SEQ ID NO: 166448 - protein, 150 aa, Heterodera glycines
SFYHCLTNHLTDHSHFDILLHPSISICQMPQHSITKSILPCHPSPYPKNAIKIKHRLRRALLGPCFAVVLPPPPPSAIGAEFVPPPVPLMCTCDTVVAIALAPSRLSSRMLAGKDTPALPRRALSTLVRATVYDYELGKRRKLSASMRTE

SEQ ID NO: 166449 - protein, 82 aa, Heterodera glycines
MEVEVKQQEGFYLKAIVTDVLENSLDVVYDRGCRKPETVEFSQCRAVIIENAQQKRPSKCGDIVDALVPIDNSTMTSRPTRR

SEQ ID NO: 166450 - protein, 40 aa, Heterodera glycines
TNILNLYCLQFNCQSKVAMQTMPLCYLKCHSKFKFLKFII

SEQ ID NO: 166451 - protein, 217 aa, Heterodera glycines; identical to SEQ ID NO: 145942
  unsure (1)..(217): unsure at all Xaa locations

SEQ ID NO: 166452 - protein, 165 aa, Heterodera glycines
  unsure (1)..(165): unsure at all Xaa locations
MGSTTNEQNEEQQNCLMKQDFEKLNLVKIVHRLTEELISRQVTINIGTIAHVAHGKVNTRXGISGVHTVKFKNELERNITIKLGYANAKIFRCSNIKCPRPHCYRSAGSSXPDRFPCERPDCGGDFVCVRHVSFVDCPGHDILMATMLNGAAVMDAALLLVAGNE

SEQ ID NO: 166453 - protein, 97 aa, Heterodera glycines
FFNGRGQFRFYETNEFKIVFFCVICGADHKYDLCFSKFRTPNPNENSKFINYNEDIFLGVFEVAENGYGSRFALENTRTRTKKSIFSQQTLGCNDNS

SEQ ID NO: 166454 - protein, 84 aa, Heterodera glycines
CTKFRAQFAESTCRSMFLLTSKIKSERVGRWQTLVKFVKFFGGLQVKNTEKMGYFKTNVIVEGAGELMPNYNGCREYVWSGSTD

SEQ ID NO: 166455 - protein, 80 aa, Heterodera glycines
IKMRKRHKKCKKAAKINFDKIFFIKFTKNSQFFFYPLTIQKNKLFRSFLFLKKNFFLVFVFRHLVMNPIKLVFTREPRDR

SEQ ID NO: 166456 - protein, 112 aa, Heterodera glycines
LGTPKTCACAERPRPIPLVEHLCKRFNCSAHELHVLFQNLEKRRDIVEHLRSAQLRTAHLRPFVRNFPVRCNDLSILDAHSVPAYRGFLGITVLFGNLVDIIKDFRYECITT

SEQ ID NO: 166457 - protein, 113 aa, Heterodera glycines
ISCGTGPSKASVSRIYEFLRISIFISKIVPYILIFLFIIFITGENLNILVNFEKNGKSQNIKIEFLKKKKFTGGTAKFSNNEKQMPVGEVKTTHNDGQQTPTVVCTTTTVTII

SEQ ID NO: 166458 - protein, 118 aa, Heterodera glycines
IIFMENQGTSTASLSSTSEASPENVSELCKKLHVATANLVRQSNKLPMLGDGHELYSSFADYAEFMRVQRNRAIIMLRRLTNYQCRLNESVLNDGMGPLIGFCDAFVDRAVCFRSFEG

SEQ ID NO: 166459 - protein, 48 aa, Heterodera glycines
FFFFFFLGQLHPFLRRALFKENLGNRGRGPAVPIGAAGKILVIFNEIC

SEQ ID NO: 166460 - protein, 161 aa, Heterodera glycines
MSLRSEPLKLCQLIVQRDAAYSCVVELGQYSLVQFKDLNHHLTTFQRTYVREVRRCAEIERCLRYLETEVVEGGVSDHIPPLDTTRTDITLLREMYDLESHLYDIERDIRQFLANEAQLKRNFNDLKQFKSVYEKVEAFFRVHIENTAKTELESEQLEIND

SEQ ID NO: 166461 - protein, 84 aa, Heterodera glycines
IILIFPKICGVLKNSCKFKNFYKQNLADYLFLLMESAWILFAKNPNIYYIYIYICVPKTPKIFAKILKRPNICQKLKQNCSRNK

SEQ ID NO: 166462 - protein, 212 aa, Heterodera glycines
MDTAESASVAPNPTGEVGETVEPSRVVSDLMWLTDQCERRCMFECAKWASEQLSHLPDQHFEAFELQNPDQRQSIGCEATNRMPTKRRALVSFVRALILNRDYDRAKSFFLSTDIGQMSCLEAFLFYFSWYMLSVRNRVENEADELDRNDEFENNELANLRTEMEAAKLKQPDLFDCFLNYLLGTVQKESGADELAIRTFTEAIQMDKRCWP

SEQ ID NO: 166463 - protein, 183 aa, Heterodera glycines
DTEPVIMENVQDKQVLLDNLHPGSEYEVTVTLRQPPGVDRRVAPKKAVQRFQTADQPPSGAPNKLRVEVLWDTKLAFGWEPPECLEQNGEISQYEYELNGLDEWNQGTRQGVSPRTRADIGELLPGSLYRFRVRAFTSAGPGPWSEPIDARTTGSELGPPRELSPISSLQNAIQLAWLPPHPE

SEQ ID NO: 166464 - protein, 42 aa, Heterodera glycines
  unsure (1)..(42): unsure at all Xaa locations
GVAXSAGMKGTXLYKSSSGRHLGAXXGRSRGQFCYLVLLVAN

SEQ ID NO: 166465 - protein, 62 aa, Heterodera glycines
MKIQAQKELLTAVEKSKNGGKAKSDGLPKRGGAVGGDKGDAKAKNGIPTAPLMNGKKNVGNG

SEQ ID NO: 166466 - protein, 178 aa, Heterodera glycines
LCESNRTIAGYFNVKILTDDHLNEYRKQFFIGPKVNFTICTEADLSVRSPVKEFWDHRVLGISEGIEHVGSLRQDLALYLLICWIICYFCIFKGVKWTGKVVYLTASFPYLMLFFLLLRGLSLPGASLGLEFYLKPDFSKLLESKVWVDAVTQVFFSYGLGVGALVALGSYNKYHNNV

SEQ ID NO: 166467 - protein, 187 aa, Heterodera glycines
WEIGKLQNELEAYRTHVQLLSQKNSGFNCVIQMFDNRLQSIMTALAKLQQKQNVKRDEVEKLCNEIEQLRAMSVKAGVTPYWNTEGAQGTVAKGGKEEEQPQQNGRGSKKSWIRSSFSRAFHKGNKKSKQQQQKENNDAADNNSLNSFSSFAHSNPSKSANAISSSSSVSVTSKMDTANRTQLGELS

SEQ ID NO: 166468 - protein, 140 aa, Heterodera glycines
  unsure (1)..(140): unsure at all Xaa locations
ASESHEITDALPRLFFELNFXHFSAFLQVSPTHFLHYWFVTSQEDSSKDPLVFWFDGGPGCSSLDGLVNEMGPYLVNPDGQTLRENPFSWNKFASMVYIEAPAGVGFSYATDGNTTTNDDLTSLRNYEAIKQFFAKHPSF

SEQ ID NO: 166469 - protein, 176 aa, Heterodera glycines
MPASVSSPNDNQNGPVNEIARIDNAHTGWIWCISVAPDGRHFYSAGWDAQIQQWHLAESRIERGLALNFPSLAALWCVLEDQNVLYASTYRRGPILFDLRAGTHPQHELNVHNNFPVFELATGPNCNQLFSIGEDNRLVSVDKRRFSALLSEHRAPVSHVDYADGHLCLSLKNGQL

SEQ ID NO: 166470 - protein, 81 aa, Heterodera glycines
  unsure (1)..(81): unsure at all Xaa locations
LTDAQQKRKERIVRNLQEVIGDEKLTKQIGAGKNIHVYWGTATTGRPHVGYLVPIPKIXDFLRNDIRVTILFADLHAVLDH

SEQ ID NO: 166471 - protein, 105 aa, Heterodera glycines
PGLKCPAQAKNFFYFREKIEIFPKKIPVDRARKTMFWKWSSFFWENSLKILKIQKPENRFLGLARKILKIFEILKSEKIELIELYNKSAGHPALRSNPNELFAWY

SEQ ID NO: 166472 - protein, 117 aa, Heterodera glycines
SQSFGVIDSANLQIGTRLGGGAFGCVNEAKWTLSCAKEAEKQQGKTGKASKSSKRVAIKTFTNFADMEKEAGLLKQLDHPNILRMFGVTKLDDKNAMVIELMNLGDLKTYVDGRKPK

SEQ ID NO: 166473 - protein, 45 aa, Heterodera glycines
  unsure (1)..(45): unsure at all Xaa locations
NFYKKITKSSIKICFXLVTLCFGEMHFSSNIYSAPFRPLRIFFPL

SEQ ID NO: 166474 - protein, 103 aa, Heterodera glycines
SVRSFGDDPSPPNWLSNWPSSDAPNWPTSAASPILVPATTPPSNLTEQNDRLKKWKQNSERAKRPFESDGGEESSDGKRTILSMGIGIVHAILTLFASLFLML

SEQ ID NO: 166475 - protein, 82 aa, Heterodera glycines
VEPPMGEVLSFKLLLNVPEGEKRSLPSLSRSAPAPAIGSFCVCFGIVPSSAVPPSLCFLSLFVPTFAFASFVWLPPLLPIPL

SEQ ID NO: 166476 - protein, 203 aa, Heterodera glycines
  unsure (1)..(203): unsure at all Xaa locations
GPDLVEMIISSTXSLLNEKHHGVLPGGHYTRLXMCDLSADVPIHFEKMAPNLERILXNLLMSDHSADHDVAGICDPFLQGEILKLLRILGIYDPGDNEXMNDILAQVATNTETTKNVGNVILYETVLTIMANKSESGLRALAVNILGRFLLYSDIYIRYVALNTLLKTDAIDFHSVLRHRSTVVECQRDADISVLKTARGRSF

SEQ ID NO: 166477 - protein, 189 aa, Heterodera glycines
FGFSAVLMIRINKFEPKEEPRDENEFEGQSPRKSDEKIIVKTDFRQQNSAESDDPPSDVAAVGLSDILGLSEKELAKRIYQAETGIKCLYFVLIRKTEQMRYLVKARKLKTIFAEQKPSTEEIVPGRPRKSLTNFDPTCADYRSLHRILMSDKERAEMYRKRNQQQRERRRQMTKDELAEARAKARQKA

SEQ ID NO: 166478 - protein, 121 aa, Heterodera glycines
RSPTEFWEQQYPLHKHAFDGNAERIRELLAQGDDPNEQDNDLWTPLHYCAFYNRLEACETLLLHPRTNVNVVNGTGATPLHFAALNGNIYVAELILSHQLADINIRDATGKTPLDLCVLVP

SEQ ID NO: 166479 - protein, 117 aa, Heterodera glycines
IRQQFDEAEVLQEQLQNQEEQQNDENVDPRLHQQRAAQQAQYERLVRLQLRESRRFRIGVASSVLVPPPLFWEGECVICTNARANFYNIRCGHVCLCADCAVAAVIQRITVCGFVPC

SEQ ID NO: 166480 - protein, 105 aa, Heterodera glycines
MAAWLDAFVQKYRSNRRVLLCIVYVALFLDNMLLTTVVPIIPEYLLRIQHPNSTDVAEQPVQRAGHGHGSSNGHSLITAAGKSADETANGDRMGQRGVGKATGER

SEQ ID NO: 166481 - protein, 189 aa, Heterodera glycines
  unsure (1)..(189): unsure at all Xaa locations
EKQLFLMEQNFQIFNVDDTKFRHPFTLTISGSTGSGKSEWVMRFLKNVDTLITNGPINKVFYCYGEFNQNIASLQKMGSIGGVQVSTHSGAPDEEMVKQKSRDAKGKLLMVLDDLMVGIGQNFLDTIFTRGSHNWGVSVVLVTQHLFSKELRIARNNSHYMVLMRNPAGALQVRTLATQLFPGRVXHLM

SEQ ID NO: 166482 - protein, 69 aa, Heterodera glycines
FLHTFKYSHAILVFAYVLPLTQNYKIRKIIFNFRYRMKQILRLLLKQLCQIPTELRKHIGQPLNRISKP

SEQ ID NO: 166483 - protein, 72 aa, Heterodera glycines; identical to SEQ ID NO: 136757

SEQ ID NO: 166484 - protein, 132 aa, Heterodera glycines
KGADGWIFDVKSISVCFSFCKIRLKCQISARKCRLRFAFHFCCSFSALSFGLRCFLPFKGFFRPLSVSSPFSPHRLPKGSAVSRSSSEVAKSVRFDPFLMAKKCRSFADAQSQIVANLFANYDPNQRPPVRG

SEQ ID NO: 166485 - protein, 30 aa, Heterodera glycines
WDDKILEMRVQKINFTLFWSFSGEFLATIE

SEQ ID NO: 166486 - protein, 43 aa, Heterodera glycines
FLSLTLTSSLSQFGRTETCVNYIKYILIFFQIIYFVVHFFVKS

SEQ ID NO: 166487 - protein, 58 aa, Heterodera glycines
  unsure (1)..(58): unsure at all Xaa locations
AXEKKRQAXKIEKDNAXDRADAAEEKGRQTQERXERVEEEXRDTQKKTTATENELDKA

SEQ ID NO: 166488 - protein, 210 aa, Heterodera glycines
MTQCNELCSELLQNGSPNNYNSSNTTNCDNDADSANSLATGTKLVAAGRNFSNKKVPVSSPKCVPTTAENVIKRPPLFYDSKRRRVDKFYQKQSSLVEYFEQDSKQIQNYQQRRLNSNCSLDVRRTLSSDSRNFSSANFNGQHSLENGGEEPAQEFDDSTVSRLLEPPPLSLGVKNVGNGTISLPKVRVIRPAGSLRNCAAQHCPSLAMS

SEQ ID NO: 166489 - protein, 56 aa, Heterodera glycines
MHKLLIKYINYSPPPRAFPSKFAPTNRWRRPAQSWSAPCCTWCTAWRMFCSATPSS

SEQ ID NO: 166490 - protein, 220 aa, Heterodera glycines
IKNEAEQLSGTAFTAPRCSNRRSWLYRVRPSVLHRPFRRLEGNGRFTNDFSQFAPNPNQMRWKPHPMPNSVANGAPSLDFVQGLYTFCGAGHPTIRNGLAIHFYTCNAKMDQKAMYNSDGDFLIVPQHGILHIVTEMGVINVGPQEIAVVPQGVRFSVDVSVPSRGYLLEVFDEHFRLPELGPIGANGLANAHWFRIPTAWFEERETSFCIINRFQGQLF

SEQ ID NO: 166491 - protein, 203 aa, Heterodera glycines
EDAVECERADCPLTSKAIIQNVLAVGVEDEDRKHTWMEDAEWFITQGALQCARAVFSFTLNTFPKKKGIWTRAAFFEREHGTVEAYEELLKKATENCADAENLWLMHAKSRWQGGDVEGSRQILSQAFKHNPNSEEIWTAAVKLESENQEFDRARKLLERARNSAPSPRFWMKSARLEWCLDNLDRANELLAEGIGRYPDFEK

SEQ ID NO: 166492 - protein, 210 aa, Heterodera glycines; identical to SEQ ID NO: 124829

SEQ ID NO: 166493 - protein, 109 aa, Heterodera glycines; identical to SEQ ID NO: 155810

SEQ ID NO: 166494 - protein, 115 aa, Heterodera glycines; identical to SEQ ID NO: 125617

SEQ ID NO: 166495 - protein, 196 aa, Heterodera glycines
IDPTFVHQMTVAEVNNQMASTGHEAPPPVKKYYGMREKHDGGRPNERQTYGEEDKSNAQNQMLTRDERRKIRRERKAMSDLADDGTRIPEGLVELKFEAPAAAAEEQLIEGETSTKSAFVSKFSTHPLGPWVPVKKEEKRPDLDSADSELQPHGKKRAKHYDDLPEQSYGPGSADYSQTPAELLEIAEMDPDDLSF

SEQ ID NO: 166496 - protein, 33 aa, Heterodera glycines
MINLSSPPPPPSPILFSICVLSRHFVNFLQKTR

SEQ ID NO: 166497 - protein, 68 aa, Heterodera glycines
FYNGFKVKMNGQFAAQSGGQNGAKDGLGFINFIFNFQFFLMICPPFRHAFARAVGCNGYSPTRAFALR

SEQ ID NO: 166498 - protein, 187 aa, Heterodera glycines
YEEGRRKLLEEEAKERMEGLSSEESDFDSYIPGRQRKREQEHLLLLLKNLIHSSALSESQADKEWKRQTEELLAQKRKKKEEEKKAEESKKSLLEKHNELLHQEHDDDREEIDKPMEQEDKILQSVTQTSALATVAEIAKGVRYTESIKTWWKPPRHIRHQTLQDHEKFRTLEGHSIEGEHCPQAIG

SEQ ID NO: 166499 - protein, 94 aa, Heterodera glycines
MNPNVTFRDSWNLIPGPLSSMVPMFGLDVQDKPFFPHLANRPENYGCQIFPSKTDYLADGMNLEKRKEFDTWYQQNRNTPFLLDEALARYLILC

SEQ ID NO: 166500 - protein, 191 aa, Heterodera glycines
STWDSFDFQAAAQKAFDIFRQGPVGWNTSSSYRRLNAIVEGLSECEKRRCDRTVGFGGSPDERGETTLDALVMDGPGHKSGAVAELRRIKSAAKVAWAVMNYTEHSLLAGEKATEFALAMGFEEESLSTEESLEMHRNWLKAKCQPNFWRNVQPDPHSQCGPYKPNWREADGADFLSPTKQLDNSIGFGFR

SEQ ID NO: 166501 - protein, 44 aa, Heterodera glycines
ICPSALSSDEQNEAQKIRNLLSSFKGTEDDLLGYLFEDCLENPK

SEQ ID NO: 166502 - protein, 92 aa, Heterodera glycines
LSFFIFNFSFFVFLVPFSASFSISVHSFSKRAMFSPSGSSELNEHHQDLKVYITTVTGNSEVNIFKATIIEQSVPSVNQKMPKKLGKNVLLE

SEQ ID NO: 166503 - protein, 157 aa, Heterodera glycines
NSPINSEYNLINNGYNPYRNGYYSVYNPTNNYNTHNNGYNPYNNEYNGGYNPMNNGYNQYSNGYNPYINEYNGGYNPMNNAYNQDSNGYNPYSNGYLNNNGYNQNSNDCFTASMVQDQRACNAMQGQCSNPLIAQTCRQTCCNMQFASGVAFPQFGG

SEQ ID NO: 166504 - protein, 68 aa, Heterodera glycines
LRRCCNWALTCAIISSQISGIPGYGSFGYKQRNSDQWVNIGENIPVFICCCSLPNLRQAFLSLGYSES

SEQ ID NO: 166505 - protein, 96 aa, Heterodera glycines
EITNYGRIESTNANGNFVNILENVPRFGTGDVVGCGLNWATRQVFFTINGQRLNNTNLYVDDGTADLYPTVSMLSHRAAVEANFGPNFRYDLSKKF

SEQ ID NO: 166506 - protein, 73 aa, Heterodera glycines
SKIKRTQCQWSTFTARFWVIPILSFLAFILLVRPSKFLFITELRGRPVYGFCAASKKEAKKACALRLLDILMT

SEQ ID NO: 166507 - protein, 81 aa, Heterodera glycines
MESKNPMEICQGKITKEQLRFGYEALGRIERHVQKGTFGRDFVEAMNDYYTRIPHSFGMRTPPPIKSPEELKRENELLEML

SEQ ID NO: 166508 - protein, 212 aa, Heterodera glycines
TDRLTFSTSANHYAMAENEDFYQQQQQIKKHQTAAPPMSRSNVAFLAASNCTKNLVWSALDKDPRLFMWRDSQLQKTLNSANILPVSESLSSMDNFSANFQSSADDGIGTQQNAFSITALEVMDLSNCGTDKERWRNEKGDEGEEEEQLLVGTSNGVVLIVRGIEMSPISAFRPFCSVQRIICCPPPFGQSSSSCRILQKELLHSSTKKAPL

SEQ ID NO: 166509 - protein, 63 aa, Heterodera glycines
IQNILENFARSSPEENVPPLPPRSPAPNENEPPRPPRSPAPNENEPPRPPHSPPPKENEPPRP

SEQ ID NO: 166510 - protein, 85 aa, Heterodera glycines; identical to SEQ ID NO: 126349
  unsure (1)..(85): unsure at all Xaa locations

SEQ ID NO: 166511 - protein, 111 aa, Heterodera glycines
VIYEHFANLLKITLFIPPPLFLLIMPFAFPSLFKTHPSEVHFVDDCAEAFSAVLAIFRRFASAADGEQFDEQTFPHVPCQGAYLGTEIAHFLENENSIPNFLNKQINKLMN

SEQ ID NO: 166512 - protein, 127 aa, Heterodera glycines
IIGQLENKRRTSVCFCNRFCSKHAKGKKKLIPTQSEIKAFTEVDENFNKILPFSDPFEWWKKHGPKLPMLSKLAMKYLSAPATSVPSEQTFKVARDVYDYRRSRLKPKTAEMLIFFNKAIPMLDYKY

SEQ ID NO: 166513 - protein, 113 aa, Heterodera glycines
LPFRPFLPSPPSPLFLSRHSLLKVFHRLSVVPFSVLLLAIYRIPSTKKLHAMAILPNEYLYLATEEKVSQFRLGQCALYGSDCVRCARDPYCSWSIARRQCFPTVRRQQRIGL

SEQ ID NO: 166514 - protein, 205 aa, Heterodera glycines
VQVQPFSFTPGQRIITSISLTVDFQKKPSNPSEPLDSDAMAREFLMQFANMVFTVTQELVLEYVQQKRSTGGGEKATAMNATTYTLKLVVKRMEGANLNSSPEEISIGPLSPNAVVIFDRPENSQINLIGRSKGKSTHRSLINPDWDFQQMGIGGLDKEFSSIFRRAFASRVFPPEFIEQLAMKHVRGILLYGPPGTGKTLIARQ

SEQ ID NO: 166515 - protein, 77 aa, Heterodera glycines
KNLGLSGRPAGLIKSGFFSQRLKTCRIGVKFCANKQWYTLNLTFRDLLIFNPAENAKKKVGWNQGRAKPGLALKVEA

SEQ ID NO: 166516 - protein, 146 aa, Heterodera glycines
  unsure (1)..(146): unsure at all Xaa locations
ADVSLSSVHWGGRYFXMPYQMTFHDHALERGQPLFVYGIPXGDFPVSLITNSLEELFIMNALLRQANCGPKCPNGQIMGSRXSEGGPFPFIKGXGFNLIILNKPLELQISINGTPFCSFFHRTIDAHKDYTKVRINAEVELTGHGK

SEQ ID NO: 166517 - protein, 200 aa, Heterodera glycines
TLCIFGRAMSDGTGRSVTDGRRETVHGDSEEKGIQSESIVLSNNCQNWRKCRENGRRTKSRGNGEDGTTNAGTATTKSDKWQSKRRKSNENDENGGKWRTNANEKTKTTEVIANEKNEAKTAEEQQQKTPTIIMSKSVVQLISKTTEEAEEEKPKERSHSAMDGCDTNRTVSTLVLPPVSPTRTVILSGSSFDTVRLNFS

SEQ ID NO: 166518 - protein, 112 aa, Heterodera glycines
IDILTKFHLWVWYCFSRSFGILPCLLSVDRTHFQLLVFFRHKKRVNNYRGSEVVTPITYHLDELQLIVALLKKGAVKAQRRSAAVRCGHSAPSVRLASGSSGGHWHGGGEKR

SEQ ID NO: 166519 - protein, 115 aa, Heterodera glycines
AVCDRSPQSPPVVATASITDVPLSTLCDDRRIADAAEQSNSSDRRAVTDGCCCCRCRGDPSISAGKAVRGESNGTAVPTYASYMDTPALLGTFAAKAGNEWSCGRSFTVWLSYRH

SEQ ID NO: 166520 - protein, 48 aa, Heterodera glycines
IFRIIFALFLFFKLFIFYFFLLDFGISFGIIFLRDQTAECAVLSPNGA

SEQ ID NO: 166521 - protein, 121 aa, Heterodera glycines
MGKYDPEEGYDSNLTDLKLFEAGEPFEMQIKLLKRPSEDNLPMTEILSSISLSLTMTVIVSTPKGTSQTNYTLDSESYRDMNYITVRGDLELFAEPSLLNDITHPILPVLILHRYRLYWYR

SEQ ID NO: 166522 - protein, 155 aa, Heterodera glycines
RDPLNSRFKFGYILDGIVCNVMLICSLNTFWDDNLSIPPLLLFVECPPMAKMLHLLATIALTAGPIDEGRDSKAERGEEEEEAACWGSTDLLVTHIKPQREGKAHPSAPSLFFFSSRHQTLFLEGVGLLRPRQYGGLLINMEIEANLERALNRQT

SEQ ID NO: 166523 - protein, 106 aa, Heterodera glycines
SLKNRCFTIASTSAPFASTKVQQNGVDSNHSPAAKQSSASSPVASTKTFRRRTAFETSEAMREIFGAYSPFSSQKKENSGEFNRKKMELENGRTMNGTQQNNKTAI

SEQ ID NO: 166524 - protein, 135 aa, Heterodera glycines
NWAAARCSTSRQFAERERQLAPMAPLLPISKTKCGSELIRTSAVLLDKSLNERKRQFQNAKKYCCCLPRNVAKKIEEVFVIYGKVMNEVKAQLLAKLDSTREEQVRLNDKVAKEVSFFEWTIKEQKAKFELGNSE

SEQ ID NO: 166525 - protein, 73 aa, Heterodera glycines
  unsure (1)..(73): unsure at all Xaa locations
GNLEPMPFVRKWGSAVDGENGAEASQPVISDERFENDAAKMASSAKHRNRSHSKSPSXRXRKRLARSPEKKXH

SEQ ID NO: 166526 - protein, 139 aa, Heterodera glycines
LGSRKKSKRSRVVSSISQASTIPTTTTTTTIVATAAADVTTASNFISSSGHSSLYNYTNINNNNSIIKLNGAELNGHCGTGVCASVATTICNTTTTRKRTTTTTVVMNVHCCVRMLNALVRSHSCTRSVKLWNCRLTRR

SEQ ID NO: 166527 - protein, 176 aa, Heterodera glycines
  unsure (1)..(176): unsure at all Xaa locations
DYMPYDQDIVREAQPARLPTATSFSSYSPAEQETYKPHSPWVDQSSKYRNEYTVGEPPVAPAAYTAFFDDMVATGPFASSLYSTSRLLERSRSRTRERRQALRSQSQARNYFRFASQYPAPLRTRDYSTPPSSYITRTPTAGXSFVSVLDNYGAKQXDLARXQXLDRSSVYNSNLA

SEQ ID NO: 166528 - protein, 64 aa, Heterodera glycines
IHLVCTVSNQQRQELAREFKILYVENLFFKLNNALSGDFEELNLALLEPPDVYDAQHMHRAMSG

SEQ ID NO: 166529 - protein, 77 aa, Heterodera glycines
  unsure (1)..(77): unsure at all Xaa locations
MNAFRLIGPISPFCLYLSISNLADLSHLFAILILLWKIWKTPSCAGLSGKSQXLFALVFTWRXLGHPFTLFPFTTTL

SEQ ID NO: 166530 - protein, 184 aa, Heterodera glycines
SHRATPQRTLALIKKLRIAQTSASGRKDRRCGRLHHLLHIEMFGILYRRLCKWRSAMHRPKWKLGPTGAAYTAPPEKASRHISGRHSRIIDGQCFKNVQHRLLFYGCHLRLLLLGQQLIGLSRHGKLLLGTANSSLQLLRLANLLLRQLLRIQLDQFFEREKLWCLCRNSVCLIVFERWNERQE

SEQ ID NO: 166531 - protein, 135 aa, Heterodera glycines
FGPNRSLLPLLPNEFSFPFLLLFLSLPFSLFVSHFVIVSRFGQIIFSLRLSKNMFFSQHLAERIRRMVHQIHAQICIFWPNALKFVPIILFLFALCFFFPSLLFLFSFPFVLSSANFVNVRFSFLPLFLFLTPKK

SEQ ID NO: 166532 - protein, 92 aa, Heterodera glycines
GSMILLLLLKINGFFFYLILIKIVLSSASHHKKKPKHFSSVPSVFFLICASIFHGSPFMCTFSLNRRLPNFPPANFDIFSICNASVVLPKDY

SEQ ID NO: 166533 - protein, 51 aa, Heterodera glycines
WWKNKLSIKIIILLKPYLGSRTIRQWQSVSGQSVSGQSVGKWTIRQWTISQ

SEQ ID NO: 166534 - protein, 94 aa, Heterodera glycines
NLFKSPLRPSVPRLAKYLSITSSSETRMLRNALFPPLSCHAAFANDVQTLEVNDKQNKTNIMPKFAILCQNLRLSGANLSGGDYNMRTPLHVAV

SEQ ID NO: 166535 - protein, 76 aa, Heterodera glycines
RIVNVSSSVHLHADSVYPEVVESCSRFGIIATYARSNLDNVMHVVALTKRILTNDSGSKVMSNACHPGRVNAEVVR

SEQ ID NO: 166536 - protein, 82 aa, Heterodera glycines
  unsure (1)..(82): unsure at all Xaa locations
TLLAXASXSFIXFXFXNLILYSIFSIICYRTFNLIXYSIFSIICYRTFNLILYSIFSIICYRTFNLILYSIFSIICYRTFNL

SEQ ID NO: 166537 - protein, 182 aa, Heterodera glycines
LGLNLTAADTAIFLDWDFNPQNDKQAAARCHRIGQDKPVKIIRLVAKHTVEELIKQRAAKKLKLSENVLGTDEKEGPSLMFDLSKLLLEGLTDLEKEQKKHTQFHILTDKQLEERLGRTDQNGHWQIKGDDKENIEDEQIEDEAEGRTLYMFEGLYFHEFAITYQRRWKLLTTGYEHQHTCR

SEQ ID NO: 166538 - protein, 181 aa, Heterodera glycines
PWGDEMPIPQCHLPYSFTYWPKGGIGFPYPPYSTHGQSILRPKRVGPPVHQRNPQLDPVIPTQHILNAALSCSRVLACLFYRLFVAPLSPYPYELYKCPVWQFQLRLGIILQLNGSTKAEEITMSPGVTHHWPLAKLSVTFTPSGLPPLPILGSDFIANRSHAGLVPEWHSHLHCDSEFAG

SEQ ID NO: 166539 - protein, 114 aa, Heterodera glycines
  unsure (1)..(114): unsure at all Xaa locations
KVAGQRFLYTTHGGALGGTAGTHHHCPLDVVKTRLQSLNGDEMRLQVQMERLGAGTASTKSTSSXPTEASSSTATAHFARCLRLLHQSVIFRSFHSVWREGRLRALYKGLGPNL

SEQ ID NO: 166540 - protein, 99 aa, Heterodera glycines
  unsure (1)..(99): unsure at all Xaa locations
KIHVSYALTDKFTMTLISEVLSRXSVANVRPCXVCLSLFSIITGVFITTATELQFDGFGLCFSLLSKRILAFLNVLAKKVLNETPMHPINLVSLNSQLG

SEQ ID NO: 166541 - protein, 53 aa, Heterodera glycines
RTQKHRPAPSTTHAQSPTDHAFSRTVCDQIIQNWNFLKFNCFLENHFNYFSKK

SEQ ID NO: 166542 - protein, 91 aa, Heterodera glycines
TASKAFHRCVDIDPSHFEALNNLGASYFLMGERQRAEKIFLEAQKLNRQNSHVLENLHIIEAEAKAKKEAEKLAKNQEVIAKKGGDSSNLG

SEQ ID NO: 166543 - protein, 37 aa, Heterodera glycines
PSSLNNKHTHPKKKITHQEGNNKHTSLKELYTTHKST

SEQ ID NO: 166544 - protein, 183 aa, Heterodera glycines
LLNLCPGNLSIINFRYILPNFPTALSMGILEWSVSARDSFLYLAFCLSIPSAVLYLAEIVNILRHKQFHKSFYALSIIRAVPTSKMIGGLAFFLTGYTFQANNLATAFILLNRLTAIAWPIKHEQFWRKFRPMVALVVFSVYLFAFIGRCSTRTDCSRWTAPTQRNTISSSMRQMIFTSYANT

SEQ ID NO: 166545 - protein, 43 aa, Heterodera glycines; identical to SEQ ID NO: 141081

SEQ ID NO: 166546 - protein, 110 aa, Heterodera glycines
MSDELNIDGAFAMNMGMPAGATEVPEGVVQLNVGGTCFLTTIDTLKRDSGALLSQLLTLEGLEKNSKVAKRMSNGTIFIDRDGELFAYVLDYLRTGKLLLPENFRELARL

SEQ ID NO: 166547 - protein, 163 aa, Heterodera glycines
ALFTILSSKMLSAQRLISLSKPERVLPGHLFPLNNNRGLLDLEDVYAATVFADSSVDGSDKEAKVVSPGSDGTQTMEGAKGQEIVGFGLFHKCTPNQFYCSLLSVSKHIEPLFVNVERVAELKKSETEKEENANKGTGRHILLRLTDVHQSLPNLSSLPQYFS

SEQ ID NO: 166548 - protein, 172 aa, Heterodera glycines
MKSMSIEQNGWKNGPCASELQSAVSQVDSASNYIADDGEQQSDEQQQTEDEGSEEEGNAAEEAEEDEEEEEEEGQAGPTSFEAMARSLVRRYYVDSKVYLCDGYAFGRNRAKSPVLNRDTVTVLNYPFEPVTIPPGIDSDEFRRAFSAAQLYLVGTAHFSKESCRDVMQTVL

SEQ ID NO: 166549 - protein, 122 aa, Heterodera glycines
GALQLFNREILQREEDANWLMPILYVLCSDLRLIARIADKRGCVLWGVHHQRKSADSQTATFYEEAAASIMDSYRICVEERSDTTTEKVSVLSLTNQLFRIYFVINQVHLLKPLIHIIDHTG

SEQ ID NO: 166550 - protein, 123 aa, Heterodera glycines
  unsure (1)..(123): unsure at all Xaa locations
TTTRAEFFPVQLELMRNYKLPTNDEENEELGYRTPDDLLLWKVLRRSSAAPTYFASVDNKYIDGGIIANNPSLELLQEIQFWNSFNKYKNFPQXAVNVGCFLSIGTGVIPPTPLKVFLKTKCH

SEQ ID NO: 166551 - protein, 149 aa, Heterodera glycines
MDLVASSLHYVGSLFDMVDLVVIGALAVFAIAYYVRSQSLSAHNKIKFSESTPTLRNGGTLQDSGRTDRSFLGRMKSEDRQILILFGSQTGTAEELAGRMAKDLCRYGKKPLLMDPEEIEVDDLPKIVELSDPVLLLFVTTYGEGDPTD

SEQ ID NO: 166552 - protein, 162 aa, Heterodera glycines
SQQPPVHPSDIPYRPRRMTSPTTFNGARVFAKLSGNSNQQQQAIEHKMAELRAAYAIQPAQTPTVAKSGANSTQNKSSAPPPRRPGRTSLPTPSLGDMLELPQLSSRSCVPSRRASTVTACFSPAPSLMDLASSAGLLSLSPSDLVFESSVLGIAYYDFVLS

SEQ ID NO: 166553 - protein, 128 aa, Heterodera glycines
VHQNRFIYGTSGFRCKAVLLSPDVRRTAFYAAIKARSLSKTVGLMITGSHNPISDNGIELVDPDRRMLPFECEIELTNIVNATDDEFERIEKEMMAKTSDATGGRRAAVFVGTDTRPSSPDLLGTAVE

SEQ ID NO: 166554 - protein, 158 aa, Heterodera glycines
  unsure (1)..(158): unsure at all Xaa locations
MREKKRLLKFAEYLGHCSREATDYGKCVATNAERIRKGDCSTEFDRLIACLKKRQVRLXIAAPMKVKRLKRAAHILTFYRYNFHFLPPFSVLLDGTFCQAALQSKINLREQMLKYLAQSVEMVVTKCVLNELHQLGKPLHGALVICEQFRIAFCPHKP

SEQ ID NO: 166555 - protein, 198 aa, Heterodera glycines
PFRIGRFGCSIIEPHLAVNVLANAQLFASFAGRLECSRFRSPRAVFLSSCTAHAGELSLLLENEEKFWCRRINDYKSYADSKLLLGIYVKHLSHVLKIRQSKIAVVSVHPGVVPGKLYRNVFWPFRLFINGFLRPFLRSPLLAATRVLDVAFSDDLCEGAYYEDSRVTALKCADDPEFVWSVGTSVRDMIVDSNANSF

SEQ ID NO: 166556 - protein, 199 aa, Heterodera glycines
GFSELFLPMGTLEDNTGATSAIFGNSTGPNGDETVRKFCDRKISSVRFLHDHSEYSSRFVTGTWCSPAGSGGNVTLWTVQQQRDEQSREGGRRIVQNGRIELPNCDVGDICVVNAQQFVVSTTAGDVQIVESPLASNGANLADGIAKISSVAKYPRVHKFASSTALCLLDEEIFSGSDSGQIIRIRPDSQSSQSTRAFA

SEQ ID NO: 166557 - protein, 149 aa, Heterodera glycines
MHFPPTIHNAQIRHGPLKPPNMSRSPTQPDTSLGKVYLECVASFSEPTKAKWLFGESELSKTDGRFEFSQEQQDTNRDKFICEIKNLDKSLTGVYKLVLISAEGRENIATFNLPLVGIEKCNWTNVAASLTMDPMVVREVPLQPLVPIR

SEQ ID NO: 166558 - protein, 35 aa, Heterodera glycines
KASLKNATFWVMQIQNVQNSVPIWLNCVISITLFS

SEQ ID NO: 166559 - protein, 41 aa, Heterodera glycines
RSFKVQKGIVVEPIKTTMLATLLNAFLQKFFRLNSSEATLI

SEQ ID NO: 166560 - protein, 165 aa, Heterodera glycines
ATRPLRFDRPAPQPQRVHPLSLIQMVTAAKIVDEQKRAKERTQTPLVYRMDPKLLIREATFNKMAQKQAAAKYLATKKRREKDEQREREFVRRAVTPPDFGQMDADAMVKLSDFMPAVPAQFDRSFRYETLTAPVKVPSDGVYSSDDILIIGAQMELANKTMTAK

SEQ ID NO: 166561 - protein, 188 aa, Heterodera glycines
YNQKIKTSNPLYGRGYFIEQKEYSNSNGCGFRKANRPLVPSNAADIESWEPKVMSTQEISKLTARCVGVTDAFIKLDNYVDSVKKYNPSNHDLLRMQRMQHQSKTLTEDPDKYAELIVQCVANPNKFNGTRHCLELVIGRRALEEFISRNEWTEERLKDYDINANWKFEPNELTVPPIPIYTGSLSSA

SEQ ID NO: 166562 - protein, 122 aa, Heterodera glycines
TLSNQWLIGNNNNNNNHILSTQLTTDTAGQSPIWYHWASMAQLCPSAHLKEAKPTRPREVPFLQHCRQCKVKTVRRPSLAARKCHLRWARVCSGNGLAPHRWHLGALLIGGDALCSQKLSDH

SEQ ID NO: 166563 - protein, 110 aa, Heterodera glycines
MPLASKSVAFLPSFSSSLCSAFLLLQFLLPFCASADFDLSTKSGSKVCVGEICADSSPFHYYECCGQIYNECCLRLQTWLIAVLLVVAICAIASFLIGLIKCICCCNGNR

SEQ ID NO: 166564 - protein, 192 aa, Heterodera glycines
  unsure (1)..(192): unsure at all Xaa locations
MSSKPETLVERMKHLLSSGDDADVLFLVGEGEGKEHVPAHRAILNSASDVFEAMFRFDTTKNATDNESAGGEAKGPVEVTDIDAHVFKVMLNFIYADDLSELNGDNAMAVLYTAKKYNLNALAKACLNVPISELGNVFLAYDQSRLLSEKDFSRRCLDYIDQNAXSLIQSDAFLEVNXNLLYEILERDQLKI

SEQ ID NO: 166565 - protein, 212 aa, Heterodera glycines
RCRVIHEFNAGRWPYIIASECNDIFDGDNEQEQNGEQETAKNGDEAKEQQGDTTKQQKIRKRKELKKKSKRRQLDKESGIGRGIDFHSVSNVINFDFPLSTDMYVHRVGRTARGFNKGTAISFASQEELNLFEVVRTEINERMGQAVIQPYEVRMKDFESFQLRARDVIAACTKTVIRETRMAEIRAELLKSKRLDAYFEKNPREKRALEQD

SEQ ID NO: 166566 - protein, 165 aa, Heterodera glycines
PRAEFGTRPCCPGSQHVVSMMKDHTGTFSASMPKSSLCLSAERVAAAVENQLKTIWCPGNGGQTLINEINAAQSSSDECARSLGFIRAMFEIAASAASHAGANAELANLAVQFREQVGTIDTNCAALGIHVGQISLGTPKGDHPQVHDSESVLSNPGTSGSHKRI

SEQ ID NO: 166567 - protein, 182 aa, Heterodera glycines
MVGFAPLTSRGSQQYRALTVPELTQQMFDAKNMMAASDPRHGRYLTVAAMFRGRMSMKEVDEQMLNVQNKNSSYFVEWIPNNVKTAVCDIPPKGLKMSVTFLGNSTAIQELFKRISDQFTAMFRRKAFLHWYTGEGMDEMEFTEAESNMNDLVSEYQQYQDATADDEGELDEEEGEGEAEAA

SEQ ID NO: 166568 - protein, 200 aa, Heterodera glycines
  unsure (1)..(200): unsure at all Xaa locations
GFDRAAMVKDMNMFXWLNGNCYRTSHYPYAEERAYWADRRGIAVITEVPAVGIWKLYSSALLKLRGEMIAEMVSRDRNHPSVIMWSLSNEPKMPADSTPYKYFKNLVTLTKRLDATRPVTAVFGHASAAVKVASLLDVICVNEYFGWYRNIGMLGLIRDQLLDQFPKWRHNYTKPVILSEYGAEAITGFNDQPSVPFSER

SEQ ID NO: 166569 - protein, 150 aa, Heterodera glycines
QPDGGVRQLRLGRQQPDGGIRQLRLGQQQQQPVGGIRQSQLWQQQPDGGIRQPQLWQQQPIGGIRQPQLWQQQPIGGIRQPQLGQQQPDGGIRQPQLGQQQPDGGIRQPQFWEWHCPATGCQWQKQRRRTVSGAVATPAAGAGATTGHSA

SEQ ID NO: 166570 - protein, 209 aa, Heterodera glycines
MDNTNNKFILLKNGAKLFYASEECVRQEAKNFVGGIVGLNGPSDLEEGIYEGGLKIWECTVDLCNFLLSNYQTMSGIDILELGCGAALPSILALSMGADSICVQDFNTFVVECFTKRNFKLNGHKIDGGKCAFINGRWGGEILGKIGQKKFGLIITCETIYNEANYASLHETMDALLADDGKILLAAKSHYFGVGGSVLAFVEFVRSRG

SEQ ID NO: 166571 - protein, 30 aa, Heterodera glycines
LLPTFVGRLAQPNCHNRRRNWKIPSQLNWT

SEQ ID NO: 166572 - protein, 122 aa, Heterodera glycines
QLSTDGALTDGAYAAKCARIGRECGDKLVAGFICQQRCSGESNDATEQQQFLHWTPGVNLSGAPGDGLGQRWRTPAEAVARDACDIVVVGRGITGAADVGAEAKRYARVAWDALRAARAWTD

SEQ ID NO: 166573 - protein, 192 aa, Heterodera glycines
VCQTLSDLSDFLDKFDGRDKTIRSLHFALVLIANRFRDRRKSDRLMAFAKQFSQTRLICRLFSQPSLLLSVLRIPRAFRLSRDRVDCALASSVSVLYLFCGWNELISLLAESGFVGRAKANILKCHGNALHFWVLALAFCIVRCLRQIALRGMPKANALARHQHNDRQWLRSIHFSHWLFRRFCSRCQFVAP

SEQ ID NO: 166574 - protein, 197 aa, Heterodera glycines
MAKYCLKKQSKRLTCKKKFKIQRKVREHSRKLKKMSKESERKKKTEKQISVPSKCPFKEEILMEAEQKRTEAKEMEQERKARQKAAKKAGGGVVKKQSKKLATTNPLSSIEALAKRVAKDEDNYNANQFLVDSLPEVPGATTENNDTKSGARANAKSVRSFAAEVRRTIENADIVIEVLDARDPLGSRSAQIETLVL

SEQ ID NO: 166575 - protein, 205 aa, Heterodera glycines
MSSAPPSPAQLLAHKVASKIIETESVNGITDAEMMALLKYGTELLEKEPARVPLEAPCYIFGDIHGNLPGFLLFFTKANVESRLLQLHSPKCNLLVLGDFVDRGLYSLEVASLLISFKLLFCDKIFVVRGNHEIESTNFEYGFKEEVDAKRPDQAEQIYNAWNCLFAKLPLCAVISNTFLCMHGGLPRPGGWDFMMGSAFVKPAD

SEQ ID NO: 166576 - protein, 100 aa, Heterodera glycines
VPSQCSPSALPNCPLPTPARPPRTAALLVAPDGSAICRLFIGLGGQRNNGTEVSQRGRLRRRLLREEKALRRYKRPTGEDSKKYPKKECPENREGNKYPK

SEQ ID NO: 166577 - protein, 222 aa, Heterodera glycines
EQSAAIEQRHRAVIQRWQQLLANSLERRRKLTEAQAHFKQIEDLYLTFAKKASAFNSGLENAEEDLTDPARCNSLEEIRALREAHTEFQKSLVGAEDDFRQLQELDRQIKSYNGGANPYTWFTIEALSETWQNLQEIIKERELELQKEHRRQEDNDKLRREFARQANEFHQWLADTRGEMMEASGSLGAQLETIRRNGQDIKAQRAKLKKVEDWGALLEEHL

SEQ ID NO: 166578 - protein, 66 aa, Heterodera glycines
GAETSARPPPPAEELCADDVKVAFIEANFMPDCERACRYYEDFADVAFETMFFGKTDEERVTKLSF

SEQ ID NO: 166579 - protein, 36 aa, Heterodera glycines
LYVYFILQIVIYIMLLVTRNQTEKFWNYSQDISLFD

SEQ ID NO: 166580 - protein, 197 aa, Heterodera glycines
MGICRWLGRKEEVSLFDNGLRIESSLKILTDDKWQNRYVVCQRRCLSEAPLLGIFKNGGCRERGEHLELFYLQNYIGYEYGFKFKRSNKTLAILIQGQTLIFSFSNVESMVFWKEWLKDVCGRSAMYFVKCHTIPKDNSVIKLNSRSARIHITRYALVIVQEVPPKQRLYLNLEDLSDVECVQNRFAFRALTYPWTP

SEQ ID NO: 166581 - protein, 132 aa, Heterodera glycines
NKSVLFSVFCSKSTALTSRWTARTFNGQPFTTTTAHFLAMGLVTVYGLGVRTLRRRTCSNRTTCDQRELSPGADPNNKCQIYCCNNANSVVTVHHRLLVLFRFGDLLIGALIRTNSFLRWPFLSHSLPVGTE

SEQ ID NO: 166582 - protein, 178 aa, Heterodera glycines
  unsure (1)..(178): unsure at all Xaa locations
VILTEDDVKFYMXEIILALEHLHSLGIVYRDLKPENILFDSDGHINLTDFGLSKESLDVPGQVTYSFCGTVEYMAPEVVNRRGHSVAADWWSLGVLMYEMLTGHLPFQGKDRHDTMNLILRAKLPMPVYLSGDAQSLLRALFKRNPANRLGGGAQGAAALRDHRFFASVNWQRLAQRQ

SEQ ID NO: 166583 - protein, 201 aa, Heterodera glycines
MRRRPFLSLFILFLSLRFTPILAHTDNENAEEAENSNKVEPERPKSDGEGEISKDPSGGFGTDIEWVPWDQAVSVALDLNRPIFLLIHKTWCGACDALKKSFATSPKRKELLELSKQFVMVNTEDEEEPEEEEYAPDGRYIPRLFILNKHGKRLPVDNKKNYPSNVAYFPQVPDVIRAMKEGTEEFEKEQKGTERTEEGEN

SEQ ID NO: 166584 - protein, 25 aa, Heterodera glycines
QGISTTNPKFTIMYNNSSKAWHIVQ

SEQ ID NO: 166585 - protein, 127 aa, Heterodera glycines
QIGKYRSYRDYTAAVDTGTELIGGPVHLMQMIIAATNADYCEEDNLYTVPCDQRPKLASIVLKVNGKDIVVPAEEYIIDLNLPDGKCALGLFGQYGVGFTTDWVLGALFLNAYCTMFDYDKGQVSFS

SEQ ID NO: 166586 - protein, 122 aa, Heterodera glycines
QELLRRRNSPVDPRDRFGSIAAKKVHMPQTERIYYGFQPDVWNEGAQIERLLHERQNAFMADDERVEDEFAEGRVPQIVEPAQGTCPGLKKHARIQRKRREWRTLMKAERKRKAVATDPGCV

SEQ ID NO: 166587 - protein, 188 aa, Heterodera glycines
EMRSDPTQSRRYKHNTAAAANGFTTAGVFVGHRTRRQWRFLLLLSVLFSVTFIFGFWAFQSDEWSSFSPPYHKLEQLASAPWNNTTSTTTAEGTKEPNGKEEGLSAEKAKTNRAENATENVPNVSSTFAVPSRHSVPDLPPACADHPPGLIGPIPVWMDGPGFETEFLIEFKNIRLKCRAEFANSCPE

SEQ ID NO: 166588 - protein, 173 aa, Heterodera glycines
GILLLLRRCYGFQRHASGKLLYVRAVGIAETVASWVFYSYAPVYAALLYDLARYSSLPLSYLKANYDPSVFYLIEMLLRIDKQIQLRDLPSVINDCRSFGLRELILSIIYIKLAERVYDLNHAIGYTSLETVKHMVQETLSTYVELAERLQSPEIKNLLTYVAKKALENGRKK

SEQ ID NO: 166589 - protein, 170 aa, Heterodera glycines
MPDEPLITERINEILESAEATRGSQQPWPPRVRLKVIYSGRWLDIPPINGRKWGPNHFAGKVANAAEMIVVRAVHPEKKAKNVNDEQLQNILGSRTDDICSVDEMVGKYYTQCDFKSRLSVLSEITMGKQLQEYSNTEATTQFKFTAADKALSDSIRTQIDAMTAKVKGM

SEQ ID NO: 166590 - protein, 43 aa, Heterodera glycines
TFCVVYFPNLFFHFVFFFCYFFKLSPFLLLYKFILIKKKKKKK

SEQ ID NO: 166591 - protein, 48 aa, Heterodera glycines
VGQSVPHLSGEAGVTPPICQCQCSNCEAGPRDSCAEETLKQIRAAYNF

SEQ ID NO: 166592 - protein, 82 aa, Heterodera glycines
  unsure (1)..(82): unsure at all Xaa locations
RYNRYAMHRSMTYIMLKQRYALRQQQPXVSLYTQALSIMSWVYIGSINFDICEEHLRQVSAPNGPIKLINMCRDPPTDNHKA

SEQ ID NO: 166593 - protein, 116 aa, Heterodera glycines
  unsure (1)..(116): unsure at all Xaa locations
MFNSYKLSKLGIAIDSMSYIFQNLNGMQEFVGISPQSAKNSXDFVMLENFLYNTNPLILHGNGPSKSQLNVLENYLTRGKIYQVFEVSVFQQSWKNVEDITFVPEEHMGNSTKNCE

SEQ ID NO: 166594 - protein, 126 aa, Heterodera glycines
TFVHFSINIVFFVPFISGILPLIPFISSSAASFGVTSKQSPLLNLGGAVNNAKELPVLAGAMVMLSLFQLAAAFSLLLYGCRTFGRTMRHVENIQRGINALQSQQNPGGEIGEQEKDAGGEMRRKL

SEQ ID NO: 166595 - protein, 122 aa, Heterodera glycines
PEPIVIRGVGHLTMCGLNSHFSTEIPRALTGKVAPEEFDDTLQRANYDLHRNESRNLRWVICGVLFCCCTFRISVWSVVCLNGTTIAALEKTLDHDNQLVYYKLSLHWKMARMPDDPINRLT

SEQ ID NO: 166596 - protein, 57 aa, Heterodera glycines
TIKIRVSNPNYSTSTERRFGAWIGGSIVSSLGTFQQLWISKGEYEETGKSIVERKCP

SEQ ID NO: 166597 - protein, 193 aa, Heterodera glycines
RIEMCCSDKWTCCCCCHVTKGAHVLAWFCLAIGILMVPVLWFFLAASLFLFFIGLLWVLPYFTGIPIILGELRGKRTHRMYLPFLIVFGIGLVFMIFYGGADIFVKMNENVPNNSTNASAVEHNRTIKKADTELSKTTLHTIKIGSYFFSWFLTLALNVWLYSIVLRAYFFMKRQNQNMNGAERNQKFENIAL

SEQ ID NO: 166598 - protein, 198 aa, Heterodera glycines
MPKPEALVDRMKLLLSTGEDADVHFLVGDEKDKKLLKAHKIVLKSASDVFEAMFRFDSQNAKNAAGEAPSSSAELFSAVEVPDVDAGAFEAMLRFIYEGNLSELNGENAMALLYAAKKYDIGGLVRACVNIHIPNLRNVFLAFAQARFLQENDFSQQCLNYIDSNADSLIRSDAFLQIDQNLLTEILERDQLKIEHEI

SEQ ID NO: 166599 - protein, 212 aa, Heterodera glycines
LSLAWASRAVRRLLPMRNFAFSTVVVVVVLVALLFVSARVVLLRLIVVLLQPLRRRHEITDKTTMPSTTMAKMRNDENGATAIGGQITRLCEILSPELEPAPNWISLGSLTIARRSSSARRLKELTLQPAQPGHHVLLRDVQPPVTALSTTSLAILSPAEPTELEVFEQSLDGGWPRSVLSSSPSVYITGRNRLIGREDVSSPVTTAEMSGS

SEQ ID NO: 166600 - protein, 201 aa, Heterodera glycines
SSSLNPRTEQLAQSQKFGLCSHLRASFPELVDLLPIQLSFSALYFLIWLAAILGNASVLYVVSLKQVQLSSVRSVFICSLAASDILMSFTSLPITAISIFTRDWVFPSPFCKLMGIFQGGTVFVSSFTLTAIAVDRYILIKHPTKQKIEFRTAICIVIGVWTLGYACALPVGLFSSTQEYPPFCGTFCEENWPDTEEQTGR

SEQ ID NO: 166601 - protein, 159 aa, Heterodera glycines
  unsure (1)..(159): unsure at all Xaa locations
MFSLIFFFIFATISHLNGNDDELWDINLSCKXFIKSLAAKYSDLVRCAVENNSPSQVCTKCVRQYINFSEQHYQSLHLANTTSLDNRTCTTVIYNSYRISYAQKMNSALSESIWEASNCHDCLRIDWNFEHGNSTFEFDNKTVQFKNYLWQWRNCVVQQ

SEQ ID NO: 166602 - protein, 26 aa, Heterodera glycines
FFFILFFTHGTVLLWTLPFYWSLRAL

SEQ ID NO: 166603 - protein, 19 aa, Heterodera glycines
NYYRHYMIFTKPYKIKKRL

SEQ ID NO: 166604 - protein, 125 aa, Heterodera glycines
AKTFYTLTTIANLFQEKASRTGSNASTTSGGSCAGLYNGVRKSAAAVSSDEAGNCVSEDDDVDSHEDENECVVNGSDDGGRTNNHVEDGQQQQQHEEDDGEASQRQIQSKGPSSDYLPFSSVLHH

SEQ ID NO: 166605 - protein, 152 aa, Heterodera glycines
GGLMDSAFEYVRDNNGLDTEESYPYEAVTGKCQFKNETVGGTVVSFKDLKEGDEEQLKIAVATIGPISVALDASNLSFQFYKTGVYYERWCSNRYLDHGVLLVGYGTDETHGDYWLVKNSWGPHWGENGYIRIARNKQNHCGIATMASYPVV

SEQ ID NO: 166606 - protein, 101 aa, Heterodera glycines
  unsure (1)..(101): unsure at all Xaa locations
HLSGTVWHRKGITCPSQGKFGHLRFLRQALLLRDALSVPSVPSVLKVPFDVKHNELEMILLFYFTGLFHFSFLISKQFFLICKFFIIYINFHLXKKKKKKK

SEQ ID NO: 166607 - protein, 84 aa, Heterodera glycines
VNVTTNSNQISVYAASKFRVDINVSTRDESHLNNKYEILMEINTTDGGKQTILLDSKALVFLHDQLDALTRTFPKCYVCVDEKK

SEQ ID NO: 166608 - protein, 195 aa, Heterodera glycines
MSSSIASPDTFLRSETDQTPAASAAEEVGKYEVFSWHGNLSDQLSAELFVTDQQLLKECREKLAKSELKETKLLWNNGELNAENRALKAELEKQKLMTEHIELKAKVFNMEQEKQQFEKKYVSVDVFNSLAERIKQLEYQQQEKREEDRNVSVGQLLEKFLAGEKQQKQQKKDNAQQRLDGKCSVVDKNNVAGTS

SEQ ID NO: 166609 - protein, 158 aa, Heterodera glycines
VHLSQNHIFCLPYNFISMVCLSRPLQIVVKKGGETVWKEVSFNKLPKDQQNANLSRMPIYFLVLPFCAASFGYYAMAQYQFNPESWVAIQIGKVTDILFPSQSTKSPNPIISLKNNALTNYKEFIETERAMRRPTEEVQMETKTEEQMRKEAEELWEQ

SEQ ID NO: 166610 - protein, 124 aa, Heterodera glycines
LDFDQRATATEPPKAAGKRFLSALLPGKKKVRLGLSISEPPLNFDIEPSKNDFEPTEIKRGENAKGGQIADHQQNFGERNRLCDGISDGSRKSRPNFAGALQNVREKLNVRPSSNSHRSSAFSP

SEQ ID NO: 166611 - protein, 58 aa, Heterodera glycines
IRINIIGTFLNTLAASFKLSINSLALFPSFCAIPLFCPALNSSTRCCCCCLLLRSATR

SEQ ID NO: 166612 - protein, 203 aa, Heterodera glycines
MNIPPKSFNLAPIAEQEGCDLDRSVSSSSFTNHQQIGQARRSHPRGMPRMIRLRRKRRDDPFGTLIQSTKKMRLNDQWNSSEGQASGVEGTTTIAKNFAMIGERAPSGSHNISKMDGVLFTEDEEDELLFYYGGQDEEDDSDADGYDDESDSNAEEYYKNDYPDEENGKFISFADGVRTNEYENDSTSGDDNFDHYGDEATKY

SEQ ID NO: 166613 - protein, 132 aa, Heterodera glycines
MASKADITQLPTTSSTVQSPAALPSAEGSVNPRHASPSSQTRFAARNTNKLNKSNNGANSSRRPHQLENQNTSESLALSAFVQSSSCSANDQDNNLDGRNSLHENYDNYDSPSVGAPGNRILSETNLYIRGL

SEQ ID NO: 166614 - protein, 117 aa, Heterodera glycines
GETIRKSPRVICHIFESEESAFIAQSIGQAFQVAYVEFLRANGIEDPNYLRDIDYQEVLNSQELLGEELEMLARKETQKDVVVSKKSGETLGIVVVESGWGSMLPTVVIANMSPGGS

SEQ ID NO: 166615 - protein, 136 aa, Heterodera glycines; identical to SEQ ID NO: 147069

SEQ ID NO: 166616 - protein, 113 aa, Heterodera glycines
  unsure (1)..(113): unsure at all Xaa locations
SLHNRLKDIHIKLDRTRRGEDRYLHLLTEXHAAITSERELLSSFEQLEANERDAFNLLSSKDDINHERXRERDERTKYWTVTGSMVGAFLGIFGTTIANELRMRRVLEMIPSG

SEQ ID NO: 166617 - protein, 209 aa, Heterodera glycines
EQSDGKTKEVLYIAGGTTGHVYNMDIWRLERPLGQPRIPWICTPLHRDGLEIGRYRLEMAAHGQKLYTFGGGAPEFCAEFDEILAFDLSTNRFGKIRALPDPKYGVPIGRKCHALVQKGNLAYLIGGCRDAETQQNQNRSHQLIADVWKFDMNTAQWVRMRNNLAKAVFFHSAALTSDDCLFVFGGCTDELSERRCNSLQQMWLQPPSL

SEQ ID NO: 166618 - protein, 61 aa, Heterodera glycines
QIKQAKMSKFVPLFLFLFSALLLIFLCPPTSAQGRPPPSKSGRPTQHGRVTTDGEDKDGTA

SEQ ID NO: 166619 - protein, 176 aa, Heterodera glycines
LEESLGEAKLDQLERCKSCNFAIIIEVSAEEHRVFACLKCHAEHCRLCGKPWDEFHLGKPCNEVETEKEQMKRYFENRLSEAVIHRCRRCSLPFVKQMGCNRMYCRCGATQCYVCRAHNIQYNHFCQHYRNPGQVKCKQCTLPCLLWERESHATKRAIDGVLREAEQMGIALDPLE

SEQ ID NO: 166620 - protein, 112 aa, Heterodera glycines
YKEEMLIFQDMVIDVPYTELNHSAFWVEFIVRHQEVPHARSGADDLNIFQYFLVDVILFLVGLSLLVLYLFILLLKLFFRLIIFLIKWPFSAGWGANKEKKGTKHAMAKKRD

SEQ ID NO: 166621 - protein, 78 aa, Heterodera glycines
EQREYICDKYADYVLPLEEADWYGLELNTACRKLQDLEDNTRAQPMKYAFEKELMAQLQREAAADGTEKQRQPTKLVG

SEQ ID NO: 166622 - protein, 60 aa, Heterodera glycines
FPLLKSSLSTHITYTNHFWLCCCCCKCSIFFLSPSSIIGCPRPLFRWCSPRAPSRRPSFR

SEQ ID NO: 166623 - protein, 59 aa, Heterodera glycines
FFFSLCIFMPFFYTFTENFDRNQRIWLLRKKIVLNAKNVMDLSWDHFLLELVLLGQFKN

SEQ ID NO: 166624 - protein, 144 aa, Heterodera glycines
MISCRRSVSKCLLPQITNRLTSNFGHLQPCCSSQKVPMCASASNRSSVRLSAIFPRMLSSSVGDKSHERPQMYQLEHIQKRLEYTVPLMFNARLDYTFYTKDVFVDNQILGSQLRSLEGFMHHISLITVAAQFCCTHIETQILN

SEQ ID NO: 166625 - protein, 85 aa, Heterodera glycines
  unsure (1)..(85): unsure at all Xaa locations
PPPLKKERTPEPQPRQLCVRDLTXNITEARLKEIFALFGALISCELPMYRVHVHLLRLYCYEXYEQAEDADKALKHMHGGQIDGL

SEQ ID NO: 166626 - protein, 189 aa, Heterodera glycines
MFRFLLQFFAFLSVTIAQNFETGDNSTVHGCSNHCSYGDRDLGCWNRSLLFFEKILLGQMRNYVAVQMNVDQWRRRNVRPYKEEFEEAKRHSIHTMIAQKHIGDDVVNNRTIETVVGALVDLAALQSNHSLVKWMPHFQCPIPCEHRYTVWRNLFILSSVLNVCLFIAILPLVKRMHNSDSTESLIQRG

SEQ ID NO: 166627 - protein, 158 aa, Heterodera glycines
PRAEFGTRAPFPKCYVCSGKGEVIVHVNLNEMLLTTFRQNVLVGALNMLKPDVMDLCQNHRILLSSEEGETDSILDRSLGLLGVLNGTQLECDDYAQQLNFKLILFNDNTLTGEQFKKVEDQATKGAKSISDDKQKRENEIDEEEGVPVKKAKILCET

SEQ ID NO: 166628 - protein, 160 aa, Heterodera glycines
VRVRFAPSPTGSLHLGGLRTALYNYLLSRSQLAQGSGKFILRIEDTDQSRLVPGASQQLVRDLEWARLPFDEGPGKPSPVGPFVQSHRLQLYRKYAHQLVADGHAYKCYCSPRKPPSSLAATPNATGYDGTCRDLSQKQLEWHAGQPFVIRFRSPRSGLN

SEQ ID NO: 166629 - protein, 178 aa, Heterodera glycines
MDVVSSESDLVATWQVPMSDKMHKIEFEHGTTTGKRILRVDGKEILRHEWMFKLVGREMFELNGVRCAINIDAAGIFAYEYSLTVGGKAFEKFREQQKKALQVWHVRMGEREIRVCLEKDTMDVWVNGSKVNTTGEFADEGTKTHLELATGSSAYILSESSGNRHIGMVHRLFVNDSL

SEQ ID NO: 166630 - protein, 162 aa, Heterodera glycines
SASQIPPFHFSPSFNYKMPFCAEFAPFLWHFFCRCPLHQIVLSALFVLCHFSFASSSFHISPSKMAPLPAEFFGPMGRRPSKHSFRRHHRMKVSRDYWLFDDNLKRREICEGRRLSPLVQNALVGLLLGEEAAEMPNDSVDLLRTTALPLRMAQNDPLNAAD

SEQ ID NO: 166631 - protein, 179 aa, Heterodera glycines
MVVHQSLSVTPTLSADGTVLVPLDQQQTQRHLAFHHHRHFGPTSPSSAMAPSSSSAAAAMTPLGVILVSKDESAERVLFMYPFERRVSPHSAHINNREKCYEHKDTVVPMIGKEVPKLGGGGMADDVRCQSAAIDRGDQQQQHLGDSIALDGTSIGFSVKMLAPLLVAKGSNGNGTPFE

SEQ ID NO: 166632 - protein, 89 aa, Heterodera glycines
LVQISYAIGVAEPLSVMVTHFGTSPFKDNDLLKIVETNFDLRPGAIIRQLGLTRPIYQRTAENGHFGNDEFPWEKPKTLALPKNLHETL

SEQ ID NO: 166633 - protein, 149 aa, Heterodera glycines
FFALDEGLPTLLKGLFTFLYQQIKESRVIAPRDGRMFGLDEFKSLYVDEDKRIEKKWRFSLVNIQDPLELSHNVAANVGKQSLASLRWKVMYGIAMLKRSPNDFRPLFRLNDPEQLKEERRAEKAQNQAIRQQQNHGGRPGRRKGEKME

SEQ ID NO: 166634 - protein, 111 aa, Heterodera glycines
  unsure (1)..(111): unsure at all Xaa locations
MNDELILPLNDSIAITIDHLTATTHITIAPDVNTDSETFNXVGIDITGMSRFRNIFQQIREYSNKKQQLKGDHASNGCHTNIDSSTNFPNSERLTSSATYFAAIAFGLGKI

SEQ ID NO: 166635 - protein, 125 aa, Heterodera glycines
GLNDALEFLLSVLGSFRVLPDLLVQEVHCGADVADDFAFNERSFTALSDWRRFEFVARNLFDFVDFAARNFFVLCALRRVFDFVASCLEGCCRLNFGILFGGFPLKGANEDTEQNSGNWEKEHFL

SEQ ID NO: 166636 - protein, 75 aa, Heterodera glycines
FSIIEDSQRMGDWIRHIHERTGLTEWQLMRVLNALDQLILARIINEVVSTKNTYIQSRLEGDDTLTGGTFYSDPH

SEQ ID NO: 166637 - protein, 96 aa, Heterodera glycines
MASQGLSPDVLAAESRKAQAKYGNITPKKGLLAKSLKGQERKYFDSGDYAMSKAGKAGPDTTVGSAHPTPEMIPHSHPPTVSASTSPAKESSLLKK

SEQ ID NO: 166638 - protein, 176 aa, Heterodera glycines
SPVSSRIPVNVSSLTARSARHRQFSTLQKSDIEAIQQQQKKQSLRPVLSSSKSTAGHRHKIMQNSERKVGAMRRKSIVGEQKDEESAGSSKGSGRKKGRFSNLARKLNIRRKPSIGLHSKRLSPALAPQPTPRALQSKVNELVEQNKLLTGINEAHVLTFQELAAKIKQLEMEMSD

SEQ ID NO: 166639 - protein, 167 aa, Heterodera glycines
MNELSTLAWYPAAEFLEFERINKAYSFNVPAFSVDTSTTDGPKYTQIMNALSEQLQQHVAKANLLISLNEKIPQFDVEVEEMMRIAIGRTQLLLNKRMKQFREHLSRHLKPIPGQKVTKLNDLHALWVLIDMQLDDIRSIFNSIEQFRLRCWAVAEPKAAATAASGN

SEQ ID NO: 166640 - protein, 185 aa, Heterodera glycines
LLGIRFSRFRVFLAVLFFAGMAIPGWTNIREQLEIQGEYNNPEQERLFHWIDKNTRKDAVFAGTMALMANVKLSTLRPIFNHPHYESEEVRNRTLLVYSLYSRKSLTEVYHSLRSSNIHFYVFQPQQCIEKHPKNGCSYLEMWDEHDASNKGRPSLCHHIWKAGKNGQQMAPFRPVYWSSTYVVL

SEQ ID NO: 166641 - protein, 76 aa, Heterodera glycines
FFFCFFWVVFLIFNNKNEEDKELEQKQNSRPEFTQAHPIFSSQNQRFPPTNCFGAFTCLAAFVFVGAAFLSIFCCF

SEQ ID NO: 166642 - protein, 64 aa, Heterodera glycines
VHLRVLFTDVMQNSIRDLSEIDPAWLQHIAPHYYEFGSNLPDGSRRKAAEEESNFAEGRLANLN

SEQ ID NO: 166643 - protein, 132 aa, Heterodera glycines
MFRLQSFQTVGKHFRQAMAMQQIAKRSISASAVRQSALRDPFFRDPIDLWLYDPLRPMRRMLRRASDPFAMLDHFFDDRWVPHVRDNAAKLGIDEKGNFTYSVDTSGYRPEELNVSIEGDEVVIQGEHKETV

SEQ ID NO: 166644 - protein, 75 aa, Heterodera glycines
EFDYTQLRSAADRSEETAFLSNADANDTVAVCSANQGSAHPRVIDLPKTDQGLGFNVMGGKDQNSPIYVSPIIPG

SEQ ID NO: 166645 - protein, 193 aa, Heterodera glycines
IEPDMNARKLPLPPIREGQRIIANLWHNKLNNFYLVHSYVLAEKFKQPGERDDHYQLPVRLQLGTSSASATPSTSSASETTSQFLVKVNNSIFKDFYSCEQLGFALISDPRRLLRNATHLEHLDGFPVWISAVPDEFRLARFAIMALAYPTKNYSRLERSGRHPDIHGHGILIVSSTGIVFSKDHPQTRIRLL

SEQ ID NO: 166646 - protein, 73 aa, Heterodera glycines
LNPYFTFYWVQHSKSPFRLALLWLIGDASASINFRLNVLQAFVLCFRHEFHRKYNAQNGHCGEHEEHILTKSG

SEQ ID NO: 166647 - protein, 79 aa, Heterodera glycines
DHSSGTDLDVQFPPHIAKGSEFIFRLTVVELLNVPKEYTDVFCQFNFLHRHDEAFSTEPVKGIAKGEHRTLPYNYVQVA

SEQ ID NO: 166648 - protein, 141 aa, Heterodera glycines
MQLFLRNLVGKTIVVETDQQFGTVRSIKEQIEQIEGIPTDDQILIFAGHILHDDQQLASNCSSSSAGDLSSGSSIHLSLRLNGGGSYDRCDPKLVQLAKSFRWDKLICRNCYARLPLRASNCRKCGSSDLRKRKTMLSKPL

SEQ ID NO: 166649 - protein, 29 aa, Heterodera glycines
ERSTMPRMSRMMDTFIAVIFWAIKFSKTK

SEQ ID NO: 166650 - protein, 118 aa, Heterodera glycines
MDHLITTPAHHHVSPLVRSRSRSETRAGTFVGYRRTRSASFTSNSAGGFTLPSYGYGGGFMARSLSRSNSSLSLFGRGLHSSALDRTPPFHNIAVQRPTPHYTDKYPFVRYSYGNIET

SEQ ID NO: 166651 - protein, 158 aa, Heterodera glycines
SLRNYSILKMIALPLFAVVLCLGLPFQSIALLSCKVGMYTTYAAHIDKQECSSADEQYCIAYGCKKDQYDVSIVWKCSVNANCDQFNAGGKADGGGAINASVCECKIGEKGANFDNAKFTFPIAEAKTMEIPSGRSSRENAGIFWAMMAIALAFLCLI

SEQ ID NO: 166652 - protein, 71 aa, Heterodera glycines
AKSAEFIAHGWLRCDIQRDTVTGSEQVLYHWGPRSETVVSKKRMLESFCDIYGTNPNNFPNHAKVAGLRGK

SEQ ID NO: 166653 - protein, 195 aa, Heterodera glycines
DNGKKLSGLVELGYRKRVLQRLGYATEEDTITEKGRVACELSSADELLLTEMIFTGAFTDLSPADAAALLSCFVFQERAPIGKLSDSLSEHLRTMQGMAKKIAKISIECKLELDEEKYVESFCPAMMTVVSKWCSGATFAEILETSDIFEGSIIRCMRRLEELLQEMVNAARSMGDRPLEQKFEQARSLLKRDIV

SEQ ID NO: 166654 - protein, 82 aa, Heterodera glycines
  unsure (1)..(82): unsure at all Xaa locations
SMHFGIKGREINVQCFFSIGYYQXSRHMIADRFRVRSTMTAYALTLQTINGRKKGGDIPFSNEELDGLIAHGTAFCLPDRLL

SEQ ID NO: 166655 - protein, 169 aa, Heterodera glycines
MTMDYLAELIQEKGTVAAFHNYFKHVDRLIDLEIARVRAQLFHFNTDEDLPKMPELDQEDIVTLHEKVYVPKKEHPEFNFVGRILGPRGMTARQLEHETGCKIMDRGRGSLRDAAKEEMNRGKPSGEHLEDDLHILSHVRTMKKVRAPTRTTVDKVKKCSSHRVDGSIV

SEQ ID NO: 166656 - protein, 38 aa, Heterodera glycines
IYRMVKKERRKIKLFFSFFLNIFNFMFFFTLKISIKFA

SEQ ID NO: 166657 - protein, 110 aa, Heterodera glycines
QLTALKGIGEMGGQRVELNTGDDSEEQEQRAILRRLYSKYGSNARDLLQRVENLLLLAEDGISAKKTVNEPNDSGKSQKMKRRQAEEDKGLIRKYLEQLMDSETGRNKTK

SEQ ID NO: 166658 - protein, 135 aa, Heterodera glycines
MSYFSADADASELITAQRRDDEQIQWVYDRMSDCVLRLFGERIWIGYHRWLPSLAAFIYLSATNLREKQSVGEEYVGLVQIGSDRRFPSLLNRLLFVFFEVISRAPLLSFLLLQQHPLILQMHSLFHPVGIDQIH

SEQ ID NO: 166659 - protein, 125 aa, Heterodera glycines
SRMILPAFYSFTFGLTSCTSATFRDEDDSWNWIAASAICGLAHATIRNNIPQGFALAAIGSLLGVSFQAVRISHNGFGMVHNRMTQGFLPFTGPLDWKHIPTDAVDVFFEFGAESFTFRHFLPKA

SEQ ID NO: 166660 - protein, 192 aa, Heterodera glycines
VLIAASIFTKSGKALVTRQYVADMTRARLEGLLNAFPKLITSDKAQRQHTFVETNSVRYVYQPMDNIYMVLITTKASNILEDLETLRLFSRVIPEYCRSNDESEITDKAFDLIFAFDEIVVLGYRESVNLAQIRTFTEMDSHEERVFNQIQIAQQRAAHTLMKEKEKEIKRQEKLKKHLKGGIGGTAASATG

SEQ ID NO: 166661 - protein, 93 aa, Heterodera glycines
ALFRPDNYLNRLNMAEKNRSEMVDIMAAIAFCNHMSTDAFLLAARLCDVFMTKKTQTMTRKKAHKLSVAAINIGSKFDVSFMDTFYYYKWRKC

SEQ ID NO: 166662 - protein, 120 aa, Heterodera glycines
KIQVLKSLPLYGAFHTKMMEKAASKVAECLGSIELREPRVNVYSNFTGKCHTRRLTQMRTDIARQVNNPVKWEQIMQILFNKRKDEEFPSYFEVGPGRELGTILHQIGKKASRTYVNYPA

SEQ ID NO: 166663 - protein, 46 aa, Heterodera glycines; identical to SEQ ID NO: 135630

SEQ ID NO: 166664 - protein, 134 aa, Heterodera glycines
EESPLEAQKREEILRMYQSCKEALRIISDVNMATMATDLPPPVVSPANDFRNNSSPVPRPAPAPPGQIPTNRPAPQPPMGARPIGMVAGAQPIMPIQNRPLPGPPGQAPMPPIHANDLNKPRIPERPQIPSRPF

SEQ ID NO: 166665 - protein, 80 aa, Heterodera glycines
  unsure (1)..(80): unsure at all Xaa locations
FRVPNAIALIRLPAPGKTYISHKLCRYLNWIGIKTMAFNVGEYRLHSCHFFQPXASEFFNPNNQIGTPITDHCAKLAMED

SEQ ID NO: 166666 - protein, 198 aa, Heterodera glycines
RSEDILPRKKRPLSATSHFDDAPAPKRQTLQASEPDNKMTRTDQKQTGKGPQNVIKLRLAKQNFRLLQQNREQDKKADQRDNMDSSTSSGMSESANTPRAPSSNLAEEPTQHSDGKLSSGQSAVATFAPRFENGKNLSVDHFASRARELKKSGNNERDKVHQILLYFESVAFYIMTASSLNSKPEKMHSSLTDVVNFL

SEQ ID NO: 166667 - protein, 59 aa, Heterodera glycines
FFINNIILFIFFLKLSQSESDRLSAEQLLNEHKRDFDRQYEENKARLEHISNTVRIWRC

SEQ ID NO: 166668 - protein, 108 aa, Heterodera glycines
CPLGIEEVKPRSLRFTWSMKTTSSLAPDEIMKEIRKVLDSNGCEYEQRERYLLLCAHGDPSKDSLIQWEMEVCKLPRLSLNGVRFKRISGSSIGFKNIASKIAQELNL

SEQ ID NO: 166669 - protein, 97 aa, Heterodera glycines
RTSHFDLISEYTREASQHSNALETFRRKRNNQKENSEQNHENQNAEAQADAHLRNTATIHRTVRSKSRSCGSGASASRYSFCEPVEKTVDFRHCDAV

SEQ ID NO: 166670 - protein, 18 aa, Heterodera glycines
QVRHIWLLRWLLMLLLMN

SEQ ID NO: 166671 - protein, 58 aa, Heterodera glycines
MNNHNCNAVGGVKAEEPPVQQLHQQLFASSSHDMQMAASTSTVGEEAAAENVHHTNQK

SEQ ID NO: 166672 - protein, 54 aa, Heterodera glycines
FMRGTMPLRRTFYYLGRGKIHLPEEVKVFPIAFHNFPNVAHERAKEFPFWHWAQ

SEQ ID NO: 166673 - protein, 112 aa, Heterodera glycines
YVHLDIMDGHFVPNLTVGPPLIECLRNKLGNDAELDVHMMVSNPSEWLDPLHIAGIHHFTFRWEALGDDEAVDTLIVRVQSWGIRCGLSIIPMTPLDKLMKFCEFIDTSLLM

SEQ ID NO: 166674 - protein, 116 aa, Heterodera glycines
SPLPIRQCPQLIAWPPVPIANHSSRSAGDQFQIHPQSSALESTREATTAATTIASAIACPSGVGQQKVPLCLLPHGHLLSFPLASLQSTARHLLFSQRTHFRRQSLPKGATISDCS

SEQ ID NO: 166675 - protein, 168 aa, Heterodera glycines
GVHSNQQYVVSRLRTLCQNIALEEFKWDGGGEQTVRDESDSFDRFITWGPQLPTDTELIWHLFCTYLDFHISPSSDGVSELSKPFSNVFFVNSSDGKFPLALMHATIQPTKQQIVPDELADEKYFIRLASARPPTFEIVVDGGETVILPCKNQPQNFWYVLILFLAHV

SEQ ID NO: 166676 - protein, 89 aa, Heterodera glycines
  unsure (1)..(89): unsure at all Xaa locations
MASEKDLFPLPNWIARPPKGSHLDVLKGEKLIQKLLVDEKGFYYFGRNPSDCDFLSEHASCSRVHAXSPLPKPVKRFALVYLQSNHGTF

SEQ ID NO: 166677 - protein, 119 aa, Heterodera glycines; identical to SEQ ID NO: 164591

SEQ ID NO: 166678 - protein, 71 aa, Heterodera glycines
IAIINYFLLLVFGFCTFGQLFVPHVARNTVLGPLKTDHSFLLPPAVLCFFGIRCPQNRCRNETGVLKFGQQ

SEQ ID NO: 166679 - protein, 189 aa, Heterodera glycines
  unsure (1)..(189): unsure at all Xaa locations
MFGAKPNQHWLVRVALLDAVTFLAPAIHDDDLERFVQIDIDDVFIGAIGSRMVADDVDYLSILQGKLREHIADFHFTLGFSGNFFRHGDPAEIQGDEILAMRTNSTXFPHMWRHNHPPEFSADYLLALMTQNRVFAENVGISANLSYAVSPQHSGVYPIYQPLYDAWSKIWSIQVTSTEEYPHLKPASG

SEQ ID NO: 166680 - protein, 177 aa, Heterodera glycines
KFSPFLLRRPQFLLLLSSQFLPFFSLIIRFLLLLIFPGVAQCARGRRLRVQRERVLEKSAQLREEGQQQTERSGDHLAQRFRNGPQPTLIRRLRIENGFDLFLLENDRGNELLAPHRDCQLTPFLCAAPTTNQIFVVYAVANERAQRVQCLVCVQRLHVAMVGASGECQLSLQLNVF

SEQ ID NO: 166681 - protein, 49 aa, Heterodera glycines
  unsure (1)..(49): unsure at all Xaa locations
APXKPRDNPXNATSRAKXQPPGHXQRAGPKQPSRPPGPPGPAGPXGQPG

SEQ ID NO: 166682 - protein, 185 aa, Heterodera glycines
MFSRLLTSTSSAAVAAAARPSIGTLLPLPGSAVVAPPILSLSQKRWATKRSGGSTKNGRDSHSKRLGLKNYCGQSVIPGNILVRQRGTEFHAGPNVGMGRDHTLYALTPGHVHFFKAYKVKVLAGGKRTLAKEYQYVQVINRDTHAAAFDKESGKLDLAKAVLESDSVRKSLERARDIKLPPVPA

SEQ ID NO: 166683 - protein, 153 aa, Heterodera glycines
KPPREMIFSDRQAGQTHGDHAFPHKTATLYSQPNGTEINRKIAGESDPNSRKPYSHCEKNSPAIHNINQTDPLVLKRKKTHGETQHHSVSQLLTLIHGLHHHPKVNVIGATNRPNSFDPALRPFGRFDREIDIGIPDAIGRLDIQRIHTTNMK

SEQ ID NO: 166684 - protein, 30 aa, Heterodera glycines; identical to SEQ ID NO: 139364

SEQ ID NO: 166685 - protein, 106 aa, Heterodera glycines
PPITLLYKVWSAASAAPSATAERWRRRRPATARQSLTRSPRRVPQGRRWRNLSPVDPLAVSALAPPPRAVGSRALRLRTPDLSPALYLHRLRAEFCRPSVRARRRL

SEQ ID NO: 166686 - protein, 209 aa, Heterodera glycines
MFLLHKFLPNLLTKCHYQQFASYHFSKSLFKLVQFNLSDIGEGIAEVQVKEWHVKEGDSIAEFDELCSVQSDKASVTITSRYNGKIKKMYYQPDEIAKVGLPLVDIEIAELSSEEEKEAPTNVLPTVKTDAPSSLLSQSPKVIASPAVRRLIREYGINTVGLTGSGRDGRILKEDILKLAYVPPPTSFGKSPDSVTAFHSRDKPSGVEI

SEQ ID NO: 166687 - protein, 127 aa, Heterodera glycines
MLSNFFCGEIKKLPVPTAASLILLLVLLSVIALVVIVTLGVLFYKKYKQTRRTKAVSSNKSETPEVPSDLADEAAESSDSDEGRGGVSTAPPDMESVVADEAAEFLDFDEGRGGVSTAPPDLESGRK

SEQ ID NO: 166688 - protein, 192 aa, Heterodera glycines
MDTANSPSVSDQQLKSIGEQKRIAQLEHKIASVSKQLDEKGTKLKETLEQNASLKDRIGTLEQEKLEVSLLIETLTKSRDRLLQEKTDLRNELLGLEKRKDQLELQVAKLNSEKHRHLEDISELRQKCDELWGERTELQSQIDDFQSDKALIVYDKEQWKREKDILLASKQWYIDEIADREKKINELIQAKS

SEQ ID NO: 166689 - protein, 158 aa, Heterodera glycines
GAPFPQFQSVRLSMPPLLFPSPSRPFLFVHRSLSPSLRRNFCFLLTSNIGKPCINCPSDVQSRHFSLDIRRMSAKSEKGLWAKFEEKKRRKYAETGSMKKQKGSKPTVNIFDGMNLRHLAIALDCDFDALCLRLLDIVSDFKLDSILSDPNAPLDRLL

SEQ ID NO: 166690 - protein, 162 aa, Heterodera glycines
EKEPYLRDDLIKRPLQLLTVDELVDVLRDQRARNITVIQLSDDESNNSKPFVIICSPFNARHGKALMIILRAFLKRNFIIKNLQVEVPERHAVPPRWNVLNMAGTIVHILDEELRLRYDLESLFLGLDCDEEGNSSAASWQVEFRLPASKLIKMPSQLGLLS

SEQ ID NO: 166691 - protein, 94 aa, Heterodera glycines; identical to SEQ ID NO: 158271

SEQ ID NO: 166692 - protein, 132 aa, Heterodera glycines
  unsure (1)..(132): unsure at all Xaa locations
TRLPPTAAPQKVELLNIEDYKKDRTMITAILYEEDHTVGNALKHIICQMPDVEFCGYNVPHPLEDKILVRIHTVXGVAAGDVLLRGLEDLARIFDTIERKFKAAHRAAHFGVSDRMEEDRNEYEEEEEEMTI

SEQ ID NO: 166693 - protein, 164 aa, Heterodera glycines
MCKESEEPFKFIPVCCYEDAQAIRAVAFHPSGGYFAIGTNSRNLLICRYQSYERRTSLNDDFLHGFVPPPTILMSRSKHHRGSVYCAAFNQTGNLLATGSNDKTIKLMAMQIDPNGCRIGVEMDLQQVHDGTVRDLLFMEDRTSACNSSSCSTLISGGAGGCRL

SEQ ID NO: 166694 - protein, 48 aa, Heterodera glycines
ESSSCEMGFTYKKSDDPISQRASFRQFNHPSVQFVSSVLLVIRPAGSA

SEQ ID NO: 166695 - protein, 69 aa, Heterodera glycines
LFFPVSGFHAKHLHRRNVSSLFSHLLTCASTGVSTDFHIIYSLNVYPSEATGLNYSNRNRMNIPTNKCC

SEQ ID NO: 166696 - protein, 69 aa, Heterodera glycines
GDVERKFDSAVVNSVTVLLLRDQRQDDKYDIYFCYRNAGSSALYESNQLKILGFYTITLYMFEQTLSFW

SEQ ID NO: 166697 - protein, 48 aa, Heterodera glycines
THFMNHIMHKQIQLNSLWSSTQFIYWKAETSSIAANPCTKLSAKSWLT

SEQ ID NO: 166698 - protein, 179 aa, Heterodera glycines
IVFLVCCNAMPNFPCCPGSQQVVAVMSNYIGTFTSEDKSTVCSTAKNTVDGIKSELSSRGGCPSGGEAQIVNEIDRQLTNIAKMKINYEDGCPYNLGFARAMFDLAAAAAGHAGNGTEWQTMKGQFEQESQAIKAIGQEMNIEVTDVHFGHPSKGFSAHQNVPSPSHVIANPGQQSSVG

SEQ ID NO: 166699 - protein, 206 aa, Heterodera glycines
MVDSNSEEAANKPSLQKHLFASHGQYVKLNVGGSLFLTTVDTLTKYNSMLKAMFSGRMEVRRDTDGYVLIDRCGKHFGLILNFLREGTLPLPDCRTEVLEILIEAKYYLLQELVDLCYSSLKALHHDQLVSTLGICRVPVVVSKKQVEQIVQSCAGKPVIELLMNRQNNKYSYNASSDENFLRNQELFDKLILRFNNRGLFIKNIG

SEQ ID NO: 166700 - protein, 34 aa, Heterodera glycines
IFFHQISSKKILIHSGSKTSRSHQLPVQPPVWPS

SEQ ID NO: 166701 - protein, 176 aa, Heterodera glycines
QMEEAFAKARSEEKQCGICMEQIVEKGLRFGILQNCTHCFCLDCIRKWRRQTDEEIKTKTVRSCPECRVHSDYVIPSKVWIDLKSDKDKLVSVFKRNTKKIACKYVVNGDVDKCPFGNKCFYKHQLPDGSIVEGKSPTQLRKNRRNDAIMFSLYDFLPSDSDWEDDFFNDNSDLFD

SEQ ID NO: 166702 - protein, 106 aa, Heterodera glycines
RIWHMLLFPHRHPRFRENWRSFLGLQRNSRRSLWRHILLPSSHATPYSLNAASAFDEEQQRLVTVKTDIGNGHSTTQQQEGTPLIADSPQSSTETNNSADDNILMI

SEQ ID NO: 166703 - protein, 166 aa, Heterodera glycines
PIKESEMIKKSAVIPSLLLCAILVAQFIEQANAYCCKVSDWPIGHPPNCNIFGCNCHCLHCVNVIEKGCCIAQKTGLTDGCSETRLKRHALPQQPKRAEAKEVFQQADTDGDGALSMDEAVNFLVSKWNMTEGELTNPDKRHWFTEIDVNRNEKLEPEEIDEAMTK

SEQ ID NO: 166704 - protein, 33 aa, Heterodera glycines
  unsure (1)..(33): unsure at all Xaa locations
FFFFFFFFXEATFTDFTKKHQREVWRNGVDSSK

SEQ ID NO: 166705 - protein, 192 aa, Heterodera glycines
MEKRRESNQKSQQGRRGSAGTAVIQNQRKSPAHPSHKKTTAPCFPPSHLQDGIQSSHYHHQHPVGGITSMGVMPHFGLHHLSTKKTTKKDRDGKKRKVTKEDIGIPTDFVHKAHIGWDGNTYSASSVGDAMDEKFLNMCQKINEDPSKMDREELGFALEFYAKNESKYPNENIGGFSQNTPFFAQNPTLATR

SEQ ID NO: 166706 - protein, 186 aa, Heterodera glycines
MLSLKKSQFLILLLFNCFVLRVFAYDGVEDQIFIRLNNTDVQCVRMLNGTHSIGCQSSRNGNVGVLTEIVHAKDVQNAIGILPLGLSNIIAVIQLTNINDALIGILRSHAQVVGILLIHRGKDKPKEFSEDGSCPNRQFTFYSNEKTIESCHGWNQKNAIHSDGLKFIDFNKPLRLVTSNEEIDLI

SEQ ID NO: 166707 - protein, 149 aa, Heterodera glycines
FSHDGDNIDILVFNHLNMRGHSHVIFIEINTSRHCPPFLLGFPFYHEPMRFQFSKEDSDVISRATGTFVYRPIKNITVSNDKTTLAEGPNMEIKTSGLYGQLRSTAPTISILVITNLPPECTEEMLRVVFQPLPGLRDILQVSNRTDIA

SEQ ID NO: 166708 - protein, 203 aa, Heterodera glycines
PLTTADGNWVPNEGNVSRLSSQMSFSADGLMTPLGTLDTQETGEATLDTARSMVVTPGGTSDNYCSSAAELEQYAEDGGDDCGDGDNDGGDSVIVHRRCSSGLSTEIVNDAMANAIRNVSRASKASATTAEGQQPATGDEQPKMRHGREFQLELDKRVSAHRLSSGSSSSASGAAAGRDVHVRTPLNDPRSPFKPLAYTSFEP

SEQ ID NO: 166709 - protein, 199 aa, Heterodera glycines
  unsure (1)..(199): unsure at all Xaa locations
MKVEKIKTRRGKKFLEDRAPKLVENDKVTLFVKGKKCSVMLNKILGELYQLKKPLANRLQRLNWPFFNDXSHKFDASLFVFGSSTKKRPNSLLFGRMYDHQMLDMVELQVENFVSSDEFKQVKSVTLGSKPCIILQGHLFESNGILQRIGNLMVDLFRGPKVEYLRLQGTELIISLTAVSEERIKFRVYRASLKKDMES

SEQ ID NO: 166710 - protein, 209 aa, Heterodera glycines
EREEKDKEKRMEVEVEVSTDGMFVRAKNAVRYPIPNSMDSPELRVYFVGNDQSNGKLCQLKSQIEFRGTSKFAVPPTTPITPIDRSSQILPPIIRIDHKWPYSRKRPKIPRRSTMAAQRLLTPAHYASPSNSAQPFIQRKSQLLNPVHFGEKSPAESMETSTTATYIDIIRDRQLYEEVQRSKTNELNSRWSTTFFVFMLLVAFLIATS

SEQ ID NO: 166711 - protein, 197 aa, Heterodera glycines
MPPPIGSIISKWTFSEALSVFSLPFPELIFRAQNVHQQHHNPSRVQISTLLSIKTGACPENCSYCPQSGYHKTGLKKEPLMEVEQVLEAAKRAKASGATRFCMGAAWRGPKDRDLDKVCEMVAKVKQLGGLETCATLGLLKNEGQAQRLKKAGLDFYNHNIDCSKDFYHKIITTRRFDDRISTIEKIRSAGIKVCCG

SEQ ID NO: 166712 - protein, 132 aa, Heterodera glycines; identical to SEQ ID NO: 126737

SEQ ID NO: 166713 - protein, 132 aa, Heterodera glycines
  unsure (1)..(132): unsure at all Xaa locations
ELIESRWINGYHKIIEHNSAQIKCRMRIGDYLPDSLPESKLPVLFYLSGLKCTEENFVVGSAMQRFASGREIIVVNPDTSPRGVVTGDGEDPSFGAAAGFYLDATETXWARNYRMYSYMVEELVPLVLTTFS

SEQ ID NO: 166714 - protein, 74 aa, Heterodera glycines
ECFSVWEPLRLRQEGTIINFVNGLDLATPGLCMPTFNFRDDFLSEIYWLLCHYPGGIREENSGNVSLFLSMSAT

SEQ ID NO: 166715 - protein, 65 aa, Heterodera glycines
DKLRERRLAPISVAQGHQMAREIKATKYLECSALTQIGLKQVFDEAIRAVLCPVQVKPKKSCAIL

SEQ ID NO: 166716 - protein, 130 aa, Heterodera glycines
MPNSASTPMEEFEEMVAVLQLDGVLDFDAVRRAVSSGAIRVRECDAETPMVQIGSHLYSGQWSQTLGTDMLLCPSSMSDYHHHEGHQRLELVAVSDTRLCAQKVLLATDESPTNGNGTRNEQSTSNSSKA

SEQ ID NO: 166717 - protein, 95 aa, Heterodera glycines
NSSSDAPAAFGRAFALCWRANTNSKNSQTRNCRSYRWECSKSKEVEECDPSADGRNSSLFALHIVKQISYLLFYNNLNRIKRKSAKKKKKKKKKK

SEQ ID NO: 166718 - protein, 160 aa, Heterodera glycines
LNMSEASSSNAPHNANANNSSNATNGGSRDRMNQSQIWKCFEKMPDYEAAKCRLCTSMLSFKRASTKGLWDHLKCKHRSEYDMLKQNFELLTPSNSDAFKAPKIKKRKMEPKSDVCVDSDNSLVSGMGTPQTEVIRVGGLANEGRTEAQLNGAGGGGGAN

SEQ ID NO: 166719 - protein, 175 aa, Heterodera glycines
MRWVLNLDGGPRRVNHAALAIGDKIYSFGGYAASDPLDSQSDFIDIHMLNTFSYRWEHLPVFAPLAFSRETTAKFPSKPRSATISAPGISDFVESVPSTSAAGDRDFPPADVRRRRARSLTEMHPLALIRSANPPLEDDQQQQLMANNIVHRRRSTPNRCEALRFRSSRVRPAID

SEQ ID NO: 166720 - protein, 183 aa, Heterodera glycines
THQMNSNLISTSSVMQKSISHAPREPSIKEEPMGGDSAKDDDNGSDKFWSMATKTTSQHGEAPAIPTMTKKRTSIELCEATQIGHREELGQLVSPKPATDRTAPTADFIRMGLHQSPSMPPMVMKALAANDNDFTISSTASDEAATTTEGKLTKSATGAHISADPTLSHIVDIGAQTSTAVQN

SEQ ID NO: 166721 - protein, 212 aa, Heterodera glycines
QLEEREMHTEGTEGRITIGTKRKPSKTTLMGTTDNSEWLGGNHIEEGSEEAMSRTSQRGRMSTKAPPPTAATPSWSSTRWKSGGETNDAKENKKAHETSRTAATERTEGNVNFRLLAIAGIIAVLFIMVGIGSICTGRYVRKSRQLHGKYRPAAYELQTTRPPPLTSSSMTFAPSNRMANSNELQQNRHFEFGQIHQIPPPVHCPHQLTMNG

SEQ ID NO: 166722 - protein, 47 aa, Heterodera glycines
HQNLIELPCEERRKGQISEEKEGQKSLVKWAESAETKNNELIKKKQF

SEQ ID NO: 166723 - protein, 56 aa, Heterodera glycines
QDLGYSAYNIDILAAFLSLSRLKNLRFLVIRHYGKVLQQILLKNVLNVPRIAMRHL

SEQ ID NO: 166724 - protein, 137 aa, Heterodera glycines
KNTATAEDQQQINRFARLHKAYSAAKEKLISLDNDVNNLNDASDEILLMDDEAAADSIPFLVGSVFVHFDQDTVNGRLELLKVSTQAEMDALRSQVGTMERELGELRAVLYAKFGDNIHLETEEDEESGDATRRNGR

SEQ ID NO: 166725 - protein, 201 aa, Heterodera glycines
MSNNENENVMNGEAVGGVEIKVEANEEVNTESQEDGEEAKIPQFSKEQMERSVMCCTNEGEIVNAPWHLMAQSKTFMQMWESLDMEEKTQEDFTDFVFPLNDITSDCFQQILAWMREHHNLPEPIVKEDPVTQERIWFKFTDWERQFFDVDFERVKEYFLASNFLDIRSLYLYCAQECARCIMDKSAEEIREMLCLEDDLT

SEQ ID NO: 166726 - protein, 145 aa, Heterodera glycines
  unsure (1)..(145): unsure at all Xaa locations
YVDCVRIFHNFIFSKSCENCITMWKFGNLSEGISGKGTLGCAETYAAHTAVMEMPRTEMWFIKMAVDPSRRFLVCGSEEXELRIWRLDTEKLPNRKSDFCLVAPTKELRKCIRQVAFSPDGRVMLSVGDGGVVSRYNLQEKEETD

SEQ ID NO: 166727 - protein, 148 aa, Heterodera glycines
MAMAARGGRGGKLPPEVNRILFIKNLPYKITAEEMYDIFGKFGAIRQIRIGNTPESRGTAFVVYEDVFDAKNACDHLSGFNVSNRYLVVLYYQATKAWKRMDTDKARVKLEEVKDRYGLGGDIEKEKEKMGIYTPKHTPGVSTPRHKH

SEQ ID NO: 166728 - protein, 145 aa, Heterodera glycines
ISLFLASPTPMLNALTNATAGFVRDHPDLPVSNTTETLTAIVYICRHMLERKEFYDRLSGDERNFFLRVMVSALILFDHIDSAGAFCRHSQVDVRGVVEVVKQKGTEQQANQLMDVLRYTSKHLNDLETPKSMRALFNERVERNI

SEQ ID NO: 166729 - protein, 197 aa, Heterodera glycines
MISSSKFCTNFDQLFNHLRLLCSNDAGAAHYGTELMPIIKENPFFGALCSVMAEEKQKIRAMTAEISCAAMALAFSLDSPTDDAKDKNCAVDQTLSECKKYYLEENELDGETKDKMKQTLEEHEQFGQLIEQNSVACLHTSRRLFAVHAQLRPVTLGDVQQFGIVLKLSTKKWQNELKDAVCSQLLLIKSRAGQKKK

SEQ ID NO: 166730 - protein, 176 aa, Heterodera glycines
  unsure (1)..(176): unsure at all Xaa locations
MSSEIENIVPNGAIDDHQKEMNKFSWTLNDFEIGKPLGKGKFGTVYLARERETKYLTALKVLFKKDMDKHGVSHQMKREIEIQYHLRHPNILRLYGYFYDEDRVYLSLEFASRGSVFQLLRKSNAFRXPYSARLIYQLADALIYCHSRNVIHRDIKPENLLINTNGDLKIADFGWS

SEQ ID NO: 166731 - protein, 135 aa, Heterodera glycines
LLSVSSQMSSGQSLSLLVFSVFLAILCSFCSSFPLQQMPSQSRPMFGKIGTSAQIVANVLPELQMVEPFPFDQISDNSQQLKSEWDGNGRGGEVQTQRLQFSSFPHFLFPVEVKRQMDDTKRGSLGPRPLSFGRR

SEQ ID NO: 166732 - protein, 49 aa, Heterodera glycines
KIKNILGLFLKYLYKHIRSFSIFSHFSKIHHKILQNQKSTTEGFVEYFF

SEQ ID NO: 166733 - protein, 60 aa, Heterodera glycines; identical to SEQ ID NO: 128156

SEQ ID NO: 166734 - protein, 66 aa, Heterodera glycines; identical to SEQ ID NO: 152131

SEQ ID NO: 166735 - protein, 59 aa, Heterodera glycines
GSRCTFYINFITYHNKKFILDYLVCEMSIFGCVGEMSEFGLAGEMSIHTFLIVIFLPYC

SEQ ID NO: 166736 - protein, 31 aa, Heterodera glycines
FFFFFFFYISPAILRKLRQYKLRALYTCRNS

SEQ ID NO: 166737 - protein, 110 aa, Heterodera glycines
LSAEFGFYPSIKSNQSLRFPNHQISYFWFKSIQLIIPFFTLFCFYFPMTIIKTFLSVCALLCFFKCNSYADENEVRQMSAVNDQFQLGPRAMNIQFTPSPFANGIIFIRN

SEQ ID NO: 166738 - protein, 201 aa, Heterodera glycines
  unsure (1)..(201): unsure at all Xaa locations
RFQHVAGTRCPTDFAEVPSNLMECFFNDPRVLQKIWRDSSGRAPTDEKTELLEGIANSRRVFDALHTTRQALYALFDLELHGERAAEIAEGRMSTTELFGHLQSKALPGLKNGDQIAYHHRIAHLFTYGAKYYSYLVARAGASLIYERLFADDPLSGRNGLXWAKVQSHGGEHPSDVLMAMALDSPEGKAPTAAELVAALD

SEQ ID NO: 166739 - protein, 97 aa, Heterodera glycines
MSPLLTPSSTVVCCKRKLDGSDCCEPAKKPYRMPFCPLPNPALQSTVELTEGELTAICCCCLCKVTSFSWRKPFFILPLGSIVCGPCDPLNWLSSEC

SEQ ID NO: 166740 - protein, 176 aa, Heterodera glycines
  unsure (1)..(176): unsure at all Xaa locations
MVFRCPVKNAIDDGPSSAVVRLFRQRFDNCDPQWLIRCPGRVNLIGEHIDYSDYSVLPMAIEHSTWVAVGPSPERTVQLVNEEEEKYPPFTLAISDSFSGASSNGAVPKWHHYFLAGWRGILESLAQREGVNTETEALQRAKGMXCXVASRIPPSAGLSSSSALVCAAALATLCVQ

SEQ ID NO: 166741 - protein, 44 aa, Heterodera glycines
IEPLISPTISHTDLSDFANECPKLMAAGADYLHLHIMDGHFRPN

SEQ ID NO: 166742 - protein, 60 aa, Heterodera glycines
MLEFFIASSYKNAMSALSVEDVHFFSVSFRVLRRVKIVGMRSLEMYSFFCGEFCSSGSTI

SEQ ID NO: 166743 - protein, 213 aa, Heterodera glycines
LRTESAWANQSPSPPSYIPVPGTGLTDDLSFWERTYNLVAHLRQLYIHQHIILRRVDKLFQKHFPGKLPDSFTLERNASINFVNNPPIFDFARPYMPRVNFVGGLHCKNQTKWTMDRKLLQFVNASSDQKGFILISGGFSAQWSHAPAEVIENLDGAIRELPDILFVWQFNGPPLRDTPNNLFAAEWLPQQELLAHPKCRAHLSHGGVNSVIE

SEQ ID NO: 166744 - protein, 178 aa, Heterodera glycines
MWKNPKKAKKEWKEISLCGDCWLSVFQFIGPYELGLKFALLSDRFDHLVDEHFKTKKWAMGFLEIRLSSRGKRAVIVNNFGDGQRSFYPIPQKPLPSNIVGFESIRISYVDQHVVQFLHRIRRLFDSVPTNLYIATAALAETVYRLKHFVRSCEAIRQHILPLLRANVRALFLSSPIF

SEQ ID NO: 166745 - protein, 17 aa, Heterodera glycines
TCYEMYKNNFIILNIIL

SEQ ID NO: 166746 - protein, 150 aa, Heterodera glycines
  unsure (1)..(150): unsure at all Xaa locations
CANVAGEYIVFTEQHDRSLHLANTNGLHRLECTTWHLQQYILLMYAQDMNSVLIESMWDESNCGDCLPIDRNWERGNSTFDFDARTSQFEQCLRQWPDRVVRHNESSICQGCRXPYDTLLVCYCDIFSDAHTVYCIDVDSEMNDTMKLWQ

SEQ ID NO: 166747 - protein, 26 aa, Heterodera glycines
VTPYIFLYIVIVLTHRAMFYLAKKKK

SEQ ID NO: 166748 - protein, 47 aa, Heterodera glycines
QALSLTRHASVSLVARHRGIDDCLGYRDCSSSSCRRAYRPRVPTSHN

SEQ ID NO: 166749 - protein, 143 aa, Heterodera glycines
  unsure (1)..(143): unsure at all Xaa locations
MSAREEIQAVGVQSLKQLKIGAGEAEFPKGKAFYKCVFLNYPTPRVYLXGAEKLEAEDVQKLVPLEKQGQRILMAKQWIAKVDSNGMFSSAQGRETANSHCQLKREPSLWKALCTVRTGFSETKVDPAEQAKLAXMSVGEDFA

SEQ ID NO: 166750 - protein, 51 aa, Heterodera glycines
ALRTVGHADETTGCFAHQIHTEMAMMMPNWMFEIASKLQIKSIEKKNRGNS

SEQ ID NO: 166751 - protein, 72 aa, Heterodera glycines
QININLWPFSPQVFMCCLAKCQGKCLSGFAVDLQQMATPTVPASVIFVRNAILAVSTARAFLASSFSAGGGH

SEQ ID NO: 166752 - protein, 185 aa, Heterodera glycines
MEPMAATESAATSSTPAKRLLTRLGTTRVGRYVQQLAIDYAASFRDIVVGMRQRPLRAVACGAALASLVFTLKSNPDEIALRARLAQLRQQMVLIPASIHSTRADERLEQYTVLLNGNRLELVDFLLFSVLVERPFDKKNEFYAAHDKTLRGWPWTELWRNAWDIGALGRFWALERSFDNCDVRH

SEQ ID NO: 166753 - protein, 210 aa, Heterodera glycines
SAAVPGEVYSLDQFVPELSEVHLRELQEEAMQFFRQNESVQKLVNLGISSVVAKRLGNPLRYGNPSRRCFLSLKIVALAKLTQTIHKVNVKEIRKLSVKEVESLSFIPPKMLCHIREEFLSIPQNQKGRVFYELSAEKRSRILAELLCLLLLFDDPEFTLPISPIVQDFYVSENVLKNLLVAMGCVVSVASETQALSLNTIRIARLVGPP

SEQ ID NO: 166754 - protein, 180 aa, Heterodera glycines
  unsure (1)..(180): unsure at all Xaa locations
RRRSSSSSSSGSSSSTGSSSSGSSSSSSTTASRSPSPKKQRAAARPSARDDRTTRRSPRRSRSPHRXPTENREKHCQLSPRHERAAPSPPPVKRERTPEPPPRRLCVRNLSRNITKAHMEEIFALFGALKSCELPMDRVHVHLPRGYGYVEYEKAEDAEKALKHMDGGQIDGLEIQCEMT

SEQ ID NO: 166755 - protein, 199 aa, Heterodera glycines
FTADPSKRPKPTELLNHSFMRNKCNETKARINIGVEPKGEVQWNSKRRSLRLDMMAVHSYYGQLKERDLMFAILNAIKLVREGTIPPIFIEKLSAVVHDKFVAVDASLAFQQSEEWSRDVLNISNASPSPEGTKRLTLREHKTPHCSGEQINTGHNNSRFPREEREYQRCEMVFFVNRNWSREHRQLFVAYQFARWFSR

SEQ ID NO: 166756 - protein, 181 aa, Heterodera glycines
MDESTDGFDEDEQQRRDHIEKLRKQREEHAIKLDAVLNRSGLSTKMQELMGKFVLVEQFYMTQSVRKAIDMDSIEEGALTSTLLDDVFFIVRKSIRRSISSSSVDCVCAMLNNGATLLETDFLKYISAPIKSGYPSTGWSAESAYQTAQNVMQGKGEVVGGLEKQRSAFITALNNLRSSID

SEQ ID NO: 166757 - protein, 145 aa, Heterodera glycines; identical to SEQ ID NO: 133769

SEQ ID NO: 166758 - protein, 209 aa, Heterodera glycines
ELPIHLTDEAHWWVSTNIPPRKYYFSMPLQIVIIAELLVLSGLFSGLNLGLMSLTPQKLTLIKNSGSPKERKNAQTILPMRKSGNRLLCSLLIRNVCINSAISILFDDLTSGTAALIISSTGIVVFGEIIPQALCVKKGLAAGACTIWVTRFCMMLTLIGSYPISLILDKLLGEQVESYDRKRLIELIKLNTKNAAQADELKIAIDAFE

SEQ ID NO: 166759 - protein, 118 aa, Heterodera glycines
KGQQGSSSSNTNPYGGYGTGGTSPYGNIPNGYGIGTGMNGYGMGTMPYKKNGYGMGTMNGYGMGTMNGYGMGTMNGYGTGTMPYGMNGYGMGTMNGYGMGTMNGYGMGTMNGYGTGTM

SEQ ID NO: 166760 - protein, 137 aa, Heterodera glycines
KSTTQPMPKPKGSHRNATKRFPFDYNRLEAILILDKLPDINGREGSDRIRAFFRKFEIGTEGWTNAEKLKALQLKVTGKAERSLNAAVDFERTASKIGMREVKFDLIKKEMLQTLDELDARETSAFDELFTGLQRRS

SEQ ID NO: 166761 - protein, 116 aa, Heterodera glycines
RHFGLCRPQQQQQQQHNNAKVKRMEQSATNSIASKYSSKPVGGSKMPALRSLISEKSNGGGFTLFLFADATAFDERMRAEVPFSTTAGGEAAKLLRKKSQPSAGLATSDRLFLFVS

SEQ ID NO: 166762 - protein, 195 aa, Heterodera glycines
LSLMMIETLISMVRYLSARKDDDFSDRMNYLYTPNILLAFSVLISFKQFGGRPLECMFPNKFPGSWEQYAENFCWSEDTYYLPPEVHVAQIQESERYSSGRKLSYYQWVPFFLLFQAACFRFPSLLWKAINLSSGLRVHDVVTKALDSQNMEESNRQRTLQILANHLARALSFQTQILRRHLIVHQTFRFLNVTC

SEQ ID NO: 166763 - protein, 103 aa, Heterodera glycines
  unsure (1)..(103): unsure at all Xaa locations
FXNICILFSHFNKKTKAGPFESFVCLLSLLPTETAQPRNARFFSGRRDIFSDFFGVLSDCRGQVTCARRPTFGRSNSASRPIPFCALSFVHLSLCRHFVLTLW

SEQ ID NO: 166764 - protein, 200 aa, Heterodera glycines
VHNPFLDHSRRSSAFAHFRPLPTPSAGFKLYDIDGRGEGVVLPQAAERILMHSAVQRRVAGHSEMFRRECEWERHFRKRKCRLINCTEDVFEQVQQMNIDSVERSAQQKVEPMDPRLAAKSVLESIARPLRKYLRFIGQEAFFRHDDSLAHLQRCLAFGFSARTFLQRFFSSSTPLQEVLSESKWSVLCDSRVSGPLRHG

SEQ ID NO: 166765 - protein, 188 aa, Heterodera glycines
RAVSPSHRSRSVSSTSSSGESAESVCSEEEQQKPAEETELKAIVEDEEKPVATEETSPIAKKSPSPMFVQMAEESEQMLEGHATVEELDGEEMNMEELEQIEEEQSIDGSKEVEICREETYVRVQELRDGRTEEATRPLTGQSKPRTDFAFAERRLLSASDQRRTSRDQLLFGPGSVTERAAGRTAHF

SEQ ID NO: 166766 - protein, 99 aa, Heterodera glycines
  unsure (1)..(99): unsure at all Xaa locations
LMYDPLLNTARHLGGQGADQQQQELTQYLSYTSGHLKYYFAVDNHYVRPKLGIILFPLFHRXWGQQMXGDAPVLPCHDVNARDLYISMMEYIAYVLVTG

SEQ ID NO: 166767 - protein, 109 aa, Heterodera glycines
LLSNGRIPLFAGVLITMVDTFTFLLIDRYGFRKLEFIFAVLISTMAITFGFEFVVVKPDGWDLMAGTLLPYCPGCGRQEFLLVFEWGSLRSPSLMIYLLFFSKNFPRKS

SEQ ID NO: 166768 - protein, 199 aa, Heterodera glycines
MNHDEPPDGGRDAWLVVLASFLAHFVVFGIQYSFGVYQSFFVNNDFKSSSPASVSLIGTVGFAAIFCVGIVSGKLAEAYGYRRTIFAGTILITSGLVLASFSSTLWQLILTQGLMVGLGSSLVYYPSVSVPSQWWKRRRSFATGIAVAGSGLGSLTITAVTDAMLRTAGLRWTLLATALMSATLLLIALVFLKTRIPRP

SEQ ID NO: 166769 - protein, 123 aa, Heterodera glycines
LIGESDQARGYFIINGMNAQGLSFGGGLGDLLAQWVLQGRPPVTTQSVVDTLDESRFLPLHAHPQYVFLRMPEVASNIYKNFTASHQCHSVRNLRTFAIHRHLQEAGAVFAYNMGYERTIRYD

SEQ ID NO: 166770 - protein, 80 aa, Heterodera glycines
STTDDDTAAFAWLSEKIFTTARGWDYYGPEGAYGALAGHDATRGLGTMDVQPIKDQFDDHGGIDPSDLEETTEWQQSLSL

SEQ ID NO: 166771 - protein, 97 aa, Heterodera glycines
  unsure (1)..(97): unsure at all Xaa locations
QISLLSMHFGAEQVNRRIYGFKADFFATIANSLATECVFLDGASHXATDAIEAWAELVEMMFSSVRDGYYAEVRRRRRCSGGASGETKSGQNEKIIK

SEQ ID NO: 166772 - protein, 192 aa, Heterodera glycines
  unsure (1)..(192): unsure at all Xaa locations
KLTNDEILRYGRQLILPSLGIHGQTSLKNSSALIVGTGGLGAPSSMYLAAAGISTLGLVDLDVVDTTNLHRQVVHAEEAQDLPKVTSARXSLQRLNSHVKYVEHNCLISAANALEIVAPYDIVLDCSDNVATRYLLNDACVLLGKPLVSGSALRLEGQLTIYNHANGPCYRCLFPTPPPDETVTNCSDGGVM

SEQ ID NO: 166773 - protein, 164 aa, Heterodera glycines
DYKAMENEEEPQLHIDVLLNVAEKLIFSPDNDFRLDLRDPNADIVNFMFAGPACRWSFFSQFRKLTQVSVNSAELQLYAPKPIQGIRGTLSNNKEFFQGPFVVTDQFFYTLFCRGILRPTVVDTFFIFGNDVVTFDSVPSSSASIMMNDWREQLEDGEETEEGE

SEQ ID NO: 166774 - protein, 201 aa, Heterodera glycines
VASPQERNWRGIATALLVIVAMCSIIALAVLVLTPPLLDADQPQKRVTLADVLTHRFLNSVESLEWLDSRRLLVKEAESVRVLELNEGAENGGPIGWTWKTLPGDLFRFGKPSSVSLSPGGRFIILNYAPSKRSPKSTYRIYDTEKQIFENVGPKQSGDENVRVLAWSPNGDHFAYVHENDVFFQRSPSASLSVQLTNESS

SEQ ID NO: 166775 - protein, 153 aa, Heterodera glycines
  unsure (1)..(153): unsure at all Xaa locations
KLGLHCVLCVSGWIEDREDSAFRHHLATYEQGASSTRENKYLEELGXAFIDFFVSFVFSYAIQRSLMETMLASLVSAIAWPLVLLGSSCVIDNPXNICTRRARQVGEHLAEVLLTRQHCRRPIHSDRFFRSVQMITSDRLLAWRPRVLIFIIL

SEQ ID NO: 166776 - protein, 55 aa, Heterodera glycines
VLLAWKLSWIIFSNFMAKLFSCGLSSCSVTLLMSSPMIIFVELKMKNCEKNKAKH

SEQ ID NO: 166777 - protein, 135 aa, Heterodera glycines
MKSDLYSQIDRKFEESSTSNEGSDNELVADDNASLNSMYMKLDFLDRVKAEIIFNSLSVDKEPKRSTTRRLMSLDGTIITAKFSSDDQKSLIRSANNFFDMCQLSKSCIDMARNYAYKSPKMKTVQIPTKKKHNK

SEQ ID NO: 166778 - protein, 54 aa, Heterodera glycines
RYFAELHPCVQPVDILLARVLGYGDAHTSYLLTIAEAELGVVIGRSQNRERLLP

SEQ ID NO: 166779 - protein, 127 aa, Heterodera glycines
MNLGACDFDTEHSVSNTVQSLVRVVNPNDRHCLARAVLLGLRDRETRQPNGGGRDAFDAYAARQHQHGPEAVVLLTRAGIAVDKDLYTLEDVGHLQRLIINEHGVGQIRLVVFEKEQEYRIVFKGEG

SEQ ID NO: 166780 - protein, 137 aa, Heterodera glycines
VDIYRTKCNARHGATAKSAVPTVDELFRAQLGHFYAQIDGIVFEDFVRSAVLGQLLRLHLSSARWPCVAWAPTGPSPPFGPRLARPSPRTVGRLPSHGRGGQSGTIAAETGPKKAQKRDGHAEDDDGMSAELRRQMT

SEQ ID NO: 166781 - protein, 60 aa, Heterodera glycines
IDRRSAQLNSRRKPGTVTVLMLLNALTRKKTIPHFGLTYYAHFILSPTYDTVQCFFFLHL

SEQ ID NO: 166782 - protein, 152 aa, Heterodera glycines
MYATAHLAPQLLIRLLSFCLCATVASAFVYGSRGGGAYGDGLRGYGGAVYGSGGHYGDWDEDGPYRPPVYRRPMYKPVPGPLYGYNKRPPVYGGGSGNNYYYPAPAPKPPTPCPPAEKPSTVVPTSSLAPPSTQQSTQTATHTSTTAQTSPK

SEQ ID NO: 166783 - protein, 180 aa, Heterodera glycines
CSLCCSFCPTSKNSTSTRVMYALMLLVGTLTSCVMLSEWVQKMLAKGGWFCSATGSAGIPVCDMVTGYQAVYRICMGMTSFFLLFMLLMLGVKSSRDGRAPIQNGFWFFKYLLLGLLIFGFFYLRDGGWATPMMWIGMLGAFIFILIQLVIIVDFAHGLAENWVSTYEENESRWCFAGMI

SEQ ID NO: 166784 - protein, 97 aa, Heterodera glycines
  unsure (1)..(97): unsure at all Xaa locations
KAITAGLKAXTLPGVEVTELPIFWGVVEKEAAGTYEWFGYLAVAEIVKKVGLKFHASLSFHGSSQAEIGIHDGVAKIGDVDPGIFFADRYGQQYKDC

SEQ ID NO: 166785 - protein, 90 aa, Heterodera glycines
MIKDRMKRQLSGTQMTNKNLLKHVATVMDPFRKYDFRPLFTKCGYGIPGAFDPGCGFPDSLLEKHAETMVARDDDGTDSQGEGVDFEVEE

SEQ ID NO: 166786 - protein, 186 aa, Heterodera glycines
MPKVGQPQLLDTYAEHRFWRFMLTAPMATHQSLKVEYMVDGCGSATFNVPSKNEQFKWAFMTCNGFSSDVKPRVQAQHSGIDPMWTDILREHAQKEFHGMVVGGDTVYMDDIWTVPAVKEWLDMRGDKATKVSAPWTAKMNSQTHKFYFDRYMAHFTLNGFAQGLAAMPYLCVWDDHDIFDGFRSY

SEQ ID NO: 166787 - protein, 136 aa, Heterodera glycines
APPPLPRHRRRFNDDIPQQKLFSDFGHTAAAFVRRRVQQQKMVVETQEQLNIDHHPSAFHRVGSATVAPQPPAAVVETNVVAGTMPTAHMNQHNQLGTGTAAQQHQYILAMLQQVMIFLWLLTKFTFVYLLFFIFG

SEQ ID NO: 166788 - protein, 149 aa, Heterodera glycines
DGRFDCLIIDACGAKSPPPGQKYPLICPFEGFVNPETIVDKMYKMLRADGTLIINTFVVPNGENESKVSEVRQFLLELFRHHFGGHCYYIGLHFSNKLLVCNLALSSAEPMTEKLFDHRMNKLPKWLQGELRTEMSIENEVWRRPKSEI

SEQ ID NO: 166789 - protein, 114 aa, Heterodera glycines
KLRARMNQSMSGQSFLSRSSSLHHSVQQQLNSAQNANAIATRPSASSSSSNFTSIWEERSSPAQCLQTPGNEKRIKKKRKDKTTALRLGAKKSADNDARGDGEGMGVAESIVLC

SEQ ID NO: 166790 - protein, 86 aa, Heterodera glycines
VLRTAPPTAFTISFNESSPATVLPPPSDPLCESIDDSREFSLQEAARQAPTVFLLMATRRSVPPRPMPEKGERIGATDSGSEAGDP

SEQ ID NO: 166791 - protein, 184 aa, Heterodera glycines
SVAPLPLAPPTQHFTKPSMTSYSDKGPKPDVGKYHGFDHVTLWVGNAKQAAMWYTLTMGFEPIAYRGLETGHRDVVSHVVRQDKITLVLQSPLNPNGVKAMNEHMAHHGDGVKDIAFDVDDVRAIFKAAVARGAKVVREPWEETDANGTVVMATIQAYNDTEHTFVERKNYKGSVFCRIFAAPA

SEQ ID NO: 166792 - protein, 33 aa, Heterodera glycines
MSINLSQYQSVDLVSFLGDSSLESVIASFGGSF

SEQ ID NO: 166793 - protein, 75 aa, Heterodera glycines
CRTILQWVGPYHRAFFCDDDSIRLPYKSSTVPDWLLLVYALGVPPFVFAFGEFICLSKPPALAIRQRLNDFEFGE

SEQ ID NO: 166794 - protein, 78 aa, Heterodera glycines
FKNNLKSFSQSNGQFGFGCSPSPPRLFLCRGRGGRAVFLRNGHLVRETDEGVHISRFARGRREFVGAVGVTVLIGAKV

SEQ ID NO: 166795 - protein, 162 aa, Heterodera glycines
LRTKYSKMNNENVNNAMVNDTRVNVNDNCQNPNDTRVHVNDTRSVFASINPLKRRVSFRDIPNIREFEQPSSSSTAPSPLPSLFLDTTHTIFKSLMVAQTPTKLLKVDEVAKYGSLDEQLDVTHVIQHTPFHNRHQSPLLLDDLTKQHASSLLFGSQDNYGL

SEQ ID NO: 166796 - protein, 126 aa, Heterodera glycines
PGLRFPDEGDDPATDFRGMGMLVLHQLVFFAQFDLDNCQRVLSLSNHPIIGFPFAICGITITALCKELLFDDLLKNHFYNALDQPSLREDLCFQVYCRAFSLFSDFWVFLRASSVMEFNVAKQRFD

SEQ ID NO: 166797 - protein, 160 aa, Heterodera glycines
PFKIFLLIDMSPSLYLSPIIEVIRCQICAHSQFVHRDAQLVPRDQLLAHIAAHINYGPSSEKNERLKQICQREYEHCICIDFAERLGHLSGEDGHRHHEQQQANMTFPAAPPPPHFASSIPNLRSLSSNSSSCLPPSSFADALPSLASSSSSSKSVSSSS

SEQ ID NO: 166798 - protein, 167 aa, Heterodera glycines
VCNGESSSSDDEYYNNFSKYKAKAALALRRNDCKSGKEITKNGKSTTKKVSSEPSDVEVFTSCPLSEQLISRAEVDPEICVVQFADTSVNSVVDHLVTETYSTTECASPLRTNPTFLTNVCRINISSKGQQKIFFCDLNEPLLNVINEFAERTNVDPKRVNLYTKQY

SEQ ID NO: 166799 - protein, 180 aa, Heterodera glycines
  unsure (1)..(180): unsure at all Xaa locations
MEGIANATELIQRLNSMEEGDEMKAEIAKLLQSHDQLTKARAKREAFGEFTEAEIGFKPTYRTLVRSGAYDSLRVPSWCDRILCEGDMDALRITKYSSCPSITLSDHFPVSAQFELHFQKEKRHQLSETIFXWLIRVEHIPTWEEFIPLVCRIAIPNDIWADLCSYRDWIGIYHNSLNSI

SEQ ID NO: 166800 - protein, 61 aa, Heterodera glycines
RKPIDRDEVPIHPAPFQLAIGTPLHRVHTLLAMLGLNHAYATNRGRRVCYFARRERRAALA

SEQ ID NO: 166801 - protein, 41 aa, Heterodera glycines
FYGNESILFLFTVTLIIPSSLFFVQITKFSTKETPIYICGF

SEQ ID NO: 166802 - protein, 182 aa, Heterodera glycines
  unsure (1)..(182): unsure at all Xaa locations
MDQNRQQNLFKMPTLLPPNLNQGALLGLSQGLLLQQSAVGASPLGHSALNLSVPSAIHSVLPTTPPNLPIISPSCSIVSRMTPANPSYPIDKYNRGPDGCNLFIYHLPQDFADTDLYSLFAHFGQILSGKVFVDKQTNLSKCFGFGKXSEESSAQNAISANNGSKLAPHGWKVRVNKSESDP

SEQ ID NO: 166803 - protein, 117 aa, Heterodera glycines
AKNVANLCLVADTYFAALLKKACTKFISSNHKSVLRSPEWKELKTHRGSLANELLESVLDHADGESILEMGSSFDGGNSDAIVSSSSFGNNNFGYLFPRNNSSTAISANLSSLPVST

SEQ ID NO: 166804 - protein, 85 aa, Heterodera glycines
ELKHLNMFRQHFLLTTMLLCALLYPIIIGVGPPAYLAICQWKDCVDEKPAPGGSHTMICLPATRPAQCPEEAWNQLTELNELEPC

SEQ ID NO: 166805 - protein, 167 aa, Heterodera glycines
EQFTAYSLLMAGRHLGSRRYSEFLQLNKLLKEEFPDFPFPKLPRKWPFRHSEQQLDSRRRMLEQYLEKVCAGIVIAESDTVQEFLMEDSGGALSAPFVDISLRVIVCGNTLALNIKRHSDTREVFGRVCEELKLGTDAGHFCTLFEVIEDSFSRKLHHHERPQILIV

SEQ ID NO: 166806 - protein, 159 aa, Heterodera glycines
IRPFLLFLPFLLFSPSAAFVDDPNLCLRLTSAAHDEIQELPGLSFRPNFKHYSGFLKTTSKNLFHYWFVTSENKPCFDPLLFWFNGGPGCSSLGGLLDELGPYLINADGKTLRKSPYPWNKNASIVYIESPAGVGFSHSVDGLPAPSSDDSAAAENYEA

SEQ ID NO: 166807 - protein, 39 aa, Heterodera glycines
IGVLRGADSVRLVEEFAEDGQFFTAVQQGGGNSREINRR

SEQ ID NO: 166808 - protein, 73 aa, Heterodera glycines
MSSPSSAASLLAIVTIFCLLCKCCVSAPHECAHSLGFVRAMFVIAASASSHVSNNSEWQALSAQFGQQISEID

SEQ ID NO: 166809 - protein, 110 aa, Heterodera glycines
KIFGGTAGQLKDLGRKPKEDGGEKMKQEKGTTERTNLNGSKTKGAKMADDFLKVMGDRDAEMRFTYLPLKDKYDGTFARELQLGEFVVLEDDCPRTEPSLAHQIDVFCDF

SEQ ID NO: 166810 - protein, 43 aa, Heterodera glycines
AMLWNYTIKSSKYLSLIPSLLIYSFSVISPFGIAYILHDGLFS

SEQ ID NO: 166811 - protein, 132 aa, Heterodera glycines
AREFVDFVLNELNVTRLLAQLNGGFFGMDEHFWQSLSGSESLDAPGGFPHECFVKGNESFSKYKYITRFAKWSDSSPGKCLSVFWRHSVCVFGLEDLLGPGSEMDRLPHLFVNKLMPGFDFYAVLCWHQRMR

SEQ ID NO: 166812 - protein, 83 aa, Heterodera glycines
SLFVFPALSQHIPSPPFFCLLLIEIGAEKMPVPMRSVKWPIHLGIRLRCQSLRDAPCVPHAVVRRRLFAVWLFSAAVHNIYGL

SEQ ID NO: 166813 - protein, 120 aa, Heterodera glycines
RRIDQRESFGLKCAKCECAIEEPMVSQACLHRFCAFCARGANCCPFCGVSTHFKIDLNFALIISKVKARGKFFVKRRIVYVLYGDGANISSFGNGRLSRMSATQEKERERTAHPSSTRLV

SEQ ID NO: 166814 - protein, 78 aa, Heterodera glycines
VGLCQRPLSLIGRRRPAAVLPARAMEHQIGGYNLPSKRLRDVTVLFHDHLLLAGDCLGLRRDGLAVLMGQVRNGGYKS

SEQ ID NO: 166815 - protein, 94 aa, Heterodera glycines
RYAMHEVGMTISGQRSQDDDKTLSQCKFEVGDFIDVVISPPEAGGRGNGGPMGGSYGGLGRRMGGGDRGMGMERERVSSAVCSGGGRFSGGFMR

SEQ ID NO: 166816 - protein, 78 aa, Heterodera glycines
KQAQPLAECFGSAFVSVILILSFFFKFSQLKGSLLCVTPFLVLALGVDDAYLMLIAWQRLRIRRALAFLAQFAQILVH

SEQ ID NO: 166817 - protein, 108 aa, Heterodera glycines
DSINNNNGTNNAYAHNLSGNEPCHSDKDKAMSSSMSHPLTLSEFARTVNKNRSAYAQCQDESEPKQTKNRRGSLFQRIVQTVRSGVDSQGKGRRLLQGDGRCRTNTAT

SEQ ID NO: 166818 - protein, 196 aa, Heterodera glycines
DRDGCDVLVATPGRLEEFLLKNRIELDCLQFLVIDEMDKFFSDFEFLRLFHELNENNRQCKSTVWPFPTFLFSATSDSLDGDVPFLRPDFFRVIAGPVNQSVAHVRQRIISTNIFMRIHPLELILQREEINGACRKTVIFVNECRRCDRLAILLSYYGYKEISINGNRSLGQRTKAMAQFDDGTYDILVRTDVISR

SEQ ID NO: 166819 - protein, 155 aa, Heterodera glycines
PTAKSAVPTVGELFRAQLGHFYAQIGDIKFEDPPSSVNFYASICLLLVGHVLQGHRPTLLRRVGPAWLGRVREQLADWRAMDEADKAAQQQKQSHKNPQKRDEHVDDDDGMSAELRRRMAQSVEQQQLFRMNMFTFQLDEAERRVQEALDGSSEE

SEQ ID NO: 166820 - protein, 150 aa, Heterodera glycines
VFAKHPISLDNSTDIFYFEITVLQKIGDSILGFAVKPARTWIEFTSSPIRTYAYENDGCLKATFVNGTFTFPQRINAKYSYGVCDTVGIGVICANRQIVFTKNGQRLDSSDFIVAPSFVGQLFPFVSLVHSGAEIEANFGPNFQFDLTTL

SEQ ID NO: 166821 - protein, 64 aa, Heterodera glycines
MAKVTLPRFCAKCCRQPPPAPPSPFRRTTDPVRAKDRGHQTTIGRRPQELLPRLVLQSLTKKDV

SEQ ID NO: 166822 - protein, 35 aa, Heterodera glycines
ACIRFLNRVFFSLESFNNLDVAFIFIYFNILLNVI

SEQ ID NO: 166823 - protein, 192 aa, Heterodera glycines
MSSSAMQIDPNPRAFLASARQSAQAAGHAQVVDAINRFDELYDRKLWHQLSVEMDKFIALQQAQEYLTNFYFQFVRDFESKLNKLSLVAGVGQAVAKHLPDNTSRITYLLALADRVKPTPPKSGEEHLHVLDMESTSAHLLATTQAAYYQLLDGQYDTVLAHISASEKRLDALDGVDTRVSSAFYRVAADYY

SEQ ID NO: 166824 - protein, 22 aa, Heterodera glycines
MLFSLSQFRKQPFLRKTTFFGQ

SEQ ID NO: 166825 - protein, 182 aa, Heterodera glycines
MMLIKFALPLLFVLLHPFVCSAAEENAGAAEIPQQFYGAFKLDHSDNWDDYLIAKGYSDPEMRKKVELPRFTRILYRFPNGTYRMMVGTGLEGSKWVKGSKKNADWQFKPNEPFIGNYWDGSKHEITFTYDPKESRLTERHVKVDGTGTPEEFNYKIDQDNNLEFYVFFKDVKLVHHYHRTD

SEQ ID NO: 166826 - protein, 169 aa, Heterodera glycines
  unsure (1)..(169): unsure at all Xaa locations
HKQSQFRKKLRQPKPKRTKAKKRSRKRKKPKRKRKKRRRRSRKRKKQRKERAKRKKLRKMKPKRRSRKRRGQKGRXQSPVPRPXLTEAADNVNKAVDDLSXLNRQKHXKNAAEATAEKTPEEXGKSIERSGRKRRKRTAEDGCQQNFGGKSEKRRGIGKRSENENGNTF

SEQ ID NO: 166827 - protein, 40 aa, Heterodera glycines
TIMNHDQLQLVNREGWAKLAFYLVSFFIYLYGMIYTMVTT

SEQ ID NO: 166828 - protein, 88 aa, Heterodera glycines
TQSNLKIKAFLFFEFEYLCFRTNKNNQDTLIYFQIRLIGYLWKSQIKQQKIIILNDFYRIYFLEFFGKNFKYENNYFILCLLMIKNII

SEQ ID NO: 166829 - protein, 210 aa, Heterodera glycines
MFSYSPLSAPFFSKSFSSPSTNEQRKIDLKFTDLCEYFFISHPFSGRKEGSEHRRVMYFHPAKESISKQIEFTGMSEAVVNFTDGFSKSDCESNISAQHDFDYRYVTSTNTKEVVLVVEGGEFLIGASFNKKNCTAKDYFLHLPTINSLLFNAYNAYKLHYGYFSYRFRAESNEFKEILDRFFTPFLHLNRVNKIPLVDLFNGGDFLSIG

SEQ ID NO: 166830 - protein, 154 aa, Heterodera glycines
MMDPKNDFYDENADVVTFKAEVSAEAPKGMPSVQSGHTLVVNGKTICVNKYILAAHSVFFRKLFFGKNAEKTPRIQLEGNAKAVPNFERLIATMAPMNLELDDGCVESVLLLAHRFQLDSVLNRCADFLLKKSKKTAICKFRLAHQCEMVAMKK

SEQ ID NO: 166831 - protein, 82 aa, Heterodera glycines
  unsure (1)..(82): unsure at all Xaa locations
THRGVMDAIDMRSVRRCYGGSEPLCAPCRSLXFFRDHHFANNFLTQHEANTDDADGLIPDLDDNGVXILRPGLFPYTLPGPY

SEQ ID NO: 166832 - protein, 197 aa, Heterodera glycines
MCYKNVLLFIVTTVAIFETSFGAENNATQPQKKQELTFEKTMEEMIISAKTGKFVRQCSCDEQEPCLKDILTDFQACFETCWEQKNSGKIAPKPEVLKQCFESRLGLVNQFISCINTTAKTCFPTKSGPQIEYVSVQRIVAAGEQRMAAQASGFERAMGPANKPVVQAAEELASCMKDCFLDKDAGQKCFGKSGCQP

SEQ ID NO: 166833 - protein, 206 aa, Heterodera glycines
DKELLKTVRESPIQGFQWATREGPLCEEPIRNVKFKMLDAQIAKEPLYRGGGQIIPTSRRCAYSAFLMATPRLMEPYYFVEVIAPADCVTAIYTVLSKRRGHVTTDAPIPGSPLYTIKAFIPVIDSFGFETDLRTHTQGQAFCMCVFSHWQIVPGDPLDKSIAIRPLELQPAPHLAREFMIKTRRRKGLSEDVSVNQFFDDPMLVE

SEQ ID NO: 166834 - protein, 207 aa, Heterodera glycines
GRNMCSKNDSSVRIDLKRCPCIHSLAQLVDVTLQSLLYQRQMIPEPASTLLHGCTPVADQFRDTYQKVQQILRGTFRSANGDGRIREFVILVGATPFSPKEIYRVRVPPTICRPSAADQQKSAEKAVPTSPESGRRMMAKALANEADDDDNDYRHKNGREEDGAENGGGRGGGTDLASAKCRCGGATVCDALNAKERRLVFSAVALS

SEQ ID NO: 166835 - protein, 168 aa, Heterodera glycines
MAPGSIPSCCLTSEQKDALIDAVRQRPVIWDCSLDAYQEVQNRRTAFVEVAELLSDEKSKYTGPEMQVEWKKLRDIFNRTLKKVVASGGSDAEVTWRYWTKLQFIADHERSHITRTRKWPKKEELSPPPVSSPSSSSSSSVARARKRMPKHRRWTELWTIRHFHWSNN

SEQ ID NO: 166836 - protein, 132 aa, Heterodera glycines
MNRRAAINNPEEARQRMTDVKSTSQILQEAIRILQQGIENETLPIVPPNQATMLEPFADRTVLLHTTLNGVKNFARLSHCFGNRTVMVAWKTLLNVFEKCEETLGESLYEVGPMDGTSKLNEIQVGLQKPIG

SEQ ID NO: 166837 - protein, 52 aa, Heterodera glycines
SSLTFFYLCFCPFHEPAIVDHGFSPMYVTSMTACIYIKFKVMQLIIYSHFPH

SEQ ID NO: 166838 - protein, 167 aa, Heterodera glycines
MVIVCYSIIIWLPIVRTDWPIVRIGWSFVRPIPILSPSVVCCCCCSLPLRLHLFHQRLQVFVLVAVLVNLHVRVHEQTFEPFVHHYVAQQCVLFRFCHSSSHGSAMVSRNCVFCRCCWCRQRWLFSCFTSKSAVLIVGTGFAVNIHCVRRHRRRFVDGQFGLQTGGQ

SEQ ID NO: 166839 - protein, 92 aa, Heterodera glycines
  unsure (1)..(92): unsure at all Xaa locations
PMVDHSDLAFGMMLRKHSPRLXYPPKIHCHLFGTDPAYRKANFTTLDTDRPLIVQFXANDPQTLLIARRLVEXIVXGVDLSLTCPQLIALQG

SEQ ID NO: 166840 - protein, 134 aa, Heterodera glycines
  unsure (1)..(134): unsure at all Xaa locations
PSFNASCSASSLFPPTLVTTNTTGGNNNNNRPSTSASTSPTSSCSSPLVLLNNSNNTGGAAGGCLLSAGGGPLHYQQQQHQNQQYHQQQHYFPPSLMLNANTFSGSGGGNTGGGVGGGGCGCCGCTGGGGGVXG

SEQ ID NO: 166841 - protein, 21 aa, Heterodera glycines
ALSVPDLLLRIFLNITIILKI

SEQ ID NO: 166842 - protein, 41 aa, Heterodera glycines
LQIHPDQSNDGLIRRIRTAWTPSEQFLISCFISTFLPFRNL

SEQ ID NO: 166843 - protein, 79 aa, Heterodera glycines
  unsure (1)..(79): unsure at all Xaa locations
TQTSVEVDCPSRKNRMNNCXVDHDDCYSKQWGQTNCDNVFCDCLERATKRSSRCETYDGPRLCHLVHTYGASDYRASVP

SEQ ID NO: 166844 - protein, 188 aa, Heterodera glycines
SLPYGDSPLLKSPAISPSKSADDIASLQKQFHLPNRRLDGASIFGSLKSDKTPPAKQLDVTKNSTADLNASFLDQSLTYKPLVLLPSVGFGAALGLHQSPKLKSNRSDSMLRSIASEDEKNVKSLDISVVYESVQQSRLNEIDDSHLSSDIQNPPSRLEFQRTPEKSTRSEPSATSAEISTHNQSPLS

SEQ ID NO: 166845 - protein, 161 aa, Heterodera glycines
ALSSAIFLLSVAKISDEDSEDSNEAGSADNQLATEIVAEFLAKFGTLAASTADVGAYMERVSLSAHVFLKLAFPIGSIIASSLQISTKKQSDEYKALVNLRDSMQKNHESIMKAISFAQEMIGMESKLDDYTNNVRIPIKNLFVHMRKFWDPSTDKSPEAV

SEQ ID NO: 166846 - protein, 130 aa, Heterodera glycines
LLFSFLFLANFSATVVQNLKRFWVRSIVSVPIPSCSMRSSFGVWNKEMPTVPPPTDTFKKETFELFNPGSAAQLISEISALPSEGRPRNFFPQQPTPQPQPNPTFFRATEPTPFVVATTPSFFRPNQQFQ

SEQ ID NO: 166847 - protein, 50 aa, Heterodera glycines
GYGGRDGYEQSGYGGYAQRGYGEKDGYEKSGYGGKDGYQNEYHDYYKNNR

SEQ ID NO: 166848 - protein, 106 aa, Heterodera glycines
TQLIFRTANSILMTDCILHGDLANILMGQYCLFGKGSIIRPPYKYFNLSFADLPVHCGDYIFIDRGCGDRAPYFCALAAMGHNTIDVHNWGVKDSSCIPTDKVLMR

SEQ ID NO: 166849 - protein, 134 aa, Heterodera glycines
  unsure (1)..(134): unsure at all Xaa locations
PRRSDHFAASVDKCSDHSVPSSALSRGVETNPSAVRPANSAAALFQLPAEYDNGQPKRIRQHRTNDHRRLGYFWRSGQLRRHSASFIVTRKRYALPEIRTKVPSFVHIISLICKYVYSFHRKKQVYFXKKKKKK

SEQ ID NO: 166850 - protein, 77 aa, Heterodera glycines
  unsure (1)..(77): unsure at all Xaa locations
DVSLFDLDKTFCITHGEREARHGPYGSRRYLGPILXGHXLMPIKGNPSGAVAASPWGSSTILTITCESIRLMGAVGL

SEQ ID NO: 166851 - protein, 185 aa, Heterodera glycines
MLQYVPWRQITFTGRLFDVGEGRATTLLFLLKCLIYMALDIVIWVALTFVSYKLLVWTFFTPFERGFYCNDQSIREPLVPNTVSTSLLIAITLGTPFFFIFLADLMRTTRPRRRNITQVINRSTLEYLNYCIAFWLMTLAIDAFKCLIGRIRPNFLSMCKPREWSEVCTVTPDAYVKLAHCTVGW

SEQ ID NO: 166852 - protein, 180 aa, Heterodera glycines
MPSPSAAFSVEDLSLHVLAVLNASPTGALESTATLTYPGTSTVIDSTALHGILLSLESKEMVTFTAVEHDRWTLTAEGAEIAASGSHEAKVFAAVPAGDEGISIAELSAKVGDAVAKIGQGKAFKNKWIGKAKSGNLVKLVKSIQDTTQEELKVVQETAGHKDPKVLVELKKRKLCDKEK

SEQ ID NO: 166853 - protein, 86 aa, Heterodera glycines
  unsure (1)..(86): unsure at all Xaa locations
LMVPLKHFSVEDEINPWMKRGTVVDXRKAMDQWTQLKKAIEXGGESTMLTXDQGSGLPDMVFSCNSGLFYRNELYLSHFRRAQRLG

SEQ ID NO: 166854 - protein, 143 aa, Heterodera glycines
GTGLKDPHIMERSGEVRVQTPYGRPSDALIEGNVAGVPGVLLSRHGRRHHDAPTDINYRANIWALKNAGVNDIAAACACGSLQEELEPGELKLIDSLIDRTTKREQTFYDGLPGHPPGICHMPMHAALDERLRRALLATATRL

SEQ ID NO: 166855 - protein, 129 aa, Heterodera glycines
ATKRYFSGTYPADGLPRCSKFPCSLIVNLVRLIFASFAHRISIQDPAGMPGTHWCAIWAQSPAVAYFFDSYGEMPIRLIKKYLSDNFKNIYYNKTRFQSVLSNVCGHYVITFVYFMSIRDWVSKMLCKF

SEQ ID NO: 166856 - protein, 126 aa, Heterodera glycines
CKSSVTTLIKRIKQIPMGLPGPPVDGVPQSAARFYSENAYIELSCFINNQPNLPRATDFNELGLNSNAENYVPTLLQRINAMVLNCTKSPEATAEVLGQLGIFLSVKNEGVNRSFKIRSSSAAGGE

SEQ ID NO: 166857 - protein, 93 aa, Heterodera glycines
  unsure (1)..(93): unsure at all Xaa locations
SFSLRTHNCGELRLSDVGSRAKLFGWMAAKRMNKFVLLRDSYGSVQTVFSFALFSSLKNTNFLSALCLEGVVADRGXEGNDXMPXGDIQVAGD

SEQ ID NO: 166858 - protein, 139 aa, Heterodera glycines
  unsure (1)..(139): unsure at all Xaa locations
MSSFDKVVVIDGKGHLLGRLASIVAKQALNGQKIVIVRCEELNIAGPFFRNKLRYHAHLPSVAXVNPARGAFHFRAPSRIFYKALRGMIPHKTARGAAALARVKVFEGVPAPWDRVKRMVVPAALRVLRLKPGRKFTRV

SEQ ID NO: 166859 - protein, 89 aa, Heterodera glycines
  unsure (1)..(89): unsure at all Xaa locations
PYTTRRMPEISPGQTLNIHGNVNANAHRYKANLLSXCNQMEAHMGSATLHVTGPIFLGKGALNSFAAGEWGKEERRSRAVAAGQPFNPR

SEQ ID NO: 166860 - protein, 139 aa, Heterodera glycines
  unsure (1)..(139): unsure at all Xaa locations
VHVRGYYLFDRQFVIRWRCRLDPANTGTSNSEKYGAYVITPMRLEGTNVTIMVNRGWVPNENVESELKKGLXMRESKLKDLNAVVRTAEKGSPFVEDDPEEGISAFEDLEKVARQSDARPIIGGMPITNPTDKESPIEG

SEQ ID NO: 166861 - protein, 38 aa, Heterodera glycines
FILISLLFNINYYFKNKICIWMTDRMTLAVPLRSCRPG

SEQ ID NO: 166862 - protein, 115 aa, Heterodera glycines
  unsure (1)..(115): unsure at all Xaa locations
RLVASKKGRIVIGLFGEVVPKTAKNFLELAKGTHGYGYKDSKFHRVIRNFMIQGGDFMRGDGTGGKTIFEGXSSHDHNFKLHHYGAGWLNMXNTVPDXNGSQFLINHTNTARLDA

SEQ ID NO: 166863 - protein, 194 aa, Heterodera glycines
LAIIATVVTLPSLYSEMSQMNSKVRDGVEAFRVNTDSAWTDLMDVQVVVTPPSKPRDNPFNSIFRAFFQLPGHCQCAGLQLPSCPPGPAGPSGPPGQAGQPGGGGRGGEGWGRRGRRRSSVAAPEGGRAKETMLALHGAPEGQRERRTEEEEPRPGRGTADPGRRKHGGSVATEGGRPEERGAGRACGEAGREG

SEQ ID NO: 166864 - protein, 109 aa, Heterodera glycines
LRHVAKSVWAQQFRHVLRPGRRPSADGVHKHGGVPKNCTLEHVLREGTLPGTPIGPCAHSTSHGNGWGQTHFRVRRCWNVRQRGRGTPPGPFPEPELSPNGGPNADRAI

SEQ ID NO: 166865 - protein, 59 aa, Heterodera glycines
FFFFLHNFAFYLQFLFNGIKSLLSNHFIKMHQCLCQQILRGCCGSVWRRSQIIARIVSN

SEQ ID NO: 166866 - protein, 120 aa, Heterodera glycines
  unsure (1)..(120): unsure at all Xaa locations
QYNDIQATEIESNWDEVVDSFDDMNLRQELLRGIYAYGFERPSAIQARAIMPVIKGHDVIAQAQSGTGKTATFAISILQKIXLQLKQTQALILAPTRELAQQIQKVVLALXDVMGIDCHA

SEQ ID NO: 166867 - protein, 80 aa, Heterodera glycines
LSGQRKFTQPPSSNGCAEEIFGELPSLAMHLPLPPAGKKMQRERPIKREGTKPKVNCWESMVKDGGFFDLGLADLHHLYF

SEQ ID NO: 166868 - protein, 120 aa, Heterodera glycines
NSKCLISNVILLQRIYNPSTQIDHYYCHRISLSRFRLFDIPQKKMLLFRLPQLFLQRVVLLRVFLQQLPFATFCRFVEGTRWLKCLKNNDCSNNHPSEENCTFSQNECDTVGTTILLNGL

SEQ ID NO: 166869 - protein, 155 aa, Heterodera glycines
MSRNFAALLRVTCDRKMARRANKQLKRVCKKAHAQHKNIETVIQQQFDDQAKLEKRREKRRRQRKRKRMEQQEKEGDYKKEGNGREEEEQTEDEADPFDDENYTVKQFEEEAERMRKKRMGTELDEDEREITHLEAKLRKKGRKKGKKELEEDGD

SEQ ID NO: 166870 - protein, 71 aa, Heterodera glycines
  unsure (1)..(71): unsure at all Xaa locations
RSCVRLTKDELRYAVYRLIGSNERLRADTERMERTNALLFQIYARLSAGPPNLEPQNLLXFGANQPNLPVA

SEQ ID NO: 166871 - protein, 141 aa, Heterodera glycines
AVQQMEELRTKNTKATRAHFADTNALRSKIQELEHSLKIAMNELSARSTQANVQQQNDMERSFRSGMNRTQSMSVTFVSRPGSAMSHQETLSNLDSAGMNDDERLKELRERNRRYPPHMRSYYLPESAHLKNSETDLNVMP

SEQ ID NO: 166872 - protein, 69 aa, Heterodera glycines
KYKFVSLCFFRVKNNFIFKSKQFQLKSFITTFRKSSTFARLNPFALSANLNKKPIRSLFWTSSDTKLTV

SEQ ID NO: 166873 - protein, 59 aa, Heterodera glycines
ESSAGADELANCAVNRKTSRTVKRMAEEEQKERKIGIFLHWHPLRGAGANRCFVSFRFV

SEQ ID NO: 166874 - protein, 134 aa, Heterodera glycines
NVIIWGNHSSTLFPDIRHAKIAKGGSETLAYDAVKDTAWIQDQFIKTVQKRGAVIIEKRKLSSAMSASKAACDHMRDWFFVTPSDGRWVSMAVFFYGSHGIPEGLVFSFPRTIDAQKKWRVGEGLYLDDFAKGR

SEQ ID NO: 166875 - protein, 34 aa, Heterodera glycines
TLKFRLFFDHSGSGLMPAARINCSGTRFNSSRDS

SEQ ID NO: 166876 - protein, 96 aa, Heterodera glycines
MLIFLIGKKSRYVFGMPFRHPQAYDQKELDMVQAFSAKIMDFWGRFARTGEPIEFWPKYNRITRKSLVLSDEIARGNSHRIYVDVHGKLCRLLEEA

SEQ ID NO: 166877 - protein, 115 aa, Heterodera glycines
VVHWKNGHSSSSEDGKTQESSESCKFRKAITAFMPSKSAPTNLDRQTAAAEGAWAYHILCAMRKALNRPIVSQICCQKFFLIQKLRQITDQNKINAQQLLQEYLLRILSPLRCTK

SEQ ID NO: 166878 - protein, 146 aa, Heterodera glycines
MSQQPNAPPPYDDAQKYPAYPNPNVPTEQGAAYQPNMNNPQHAPPQPSPGAAPAGNTTTTYVYMADGGQPHWGPRPQNVFCSNCRQQVLTKVKYSAGLLTWLLFGGCLLFGCWLGCCLLPFCMDDCQDCEHYCTNCKAYMGQYKRL

SEQ ID NO: 166879 - protein, 207 aa, Heterodera glycines
MIGGEDLFTNSDEELDEQKSPETKECEQSRLVISPASDSFSTAAEFSNNEPSHNQFPEAPLTPSSSQSPHQHLDKLSSILIDGSIQIFIRAYEKRGEGINAYIVYKIETMASKIPGYIKNRFEVWRRFSDFLGLRAKLAEKYQQLGVIVPYAPEKSITSLTKTKLNAGEEHSDLANKRSRLLERFLRRLAAHPRLGSDCEVRDFLLL

SEQ ID NO: 166880 - protein, 94 aa, Heterodera glycines
YLSKHASEFMDGPLIHKAYIIPFTFDIKQASFGAIKKGNYVGMALPIRKYINWKSVFLFLPWVVQIKLLEEVQTNGGDWEHALKNLVPERGLEN

SEQ ID NO: 166881 - protein, 89 aa, Heterodera glycines
  unsure (1)..(89): unsure at all Xaa locations
QMSSDGRPSKSSRMAQAQEAVARVKAPDGELQPSTEIDLFISTEKIMVLNTDLQRISXIYVRQDILMDHSLRSISYIADIGDLVVLMAR

SEQ ID NO: 166882 - protein, 54 aa, Heterodera glycines
MPQVINLKNLPPDELSIYNKLYPCKVALLTLKKGQSFSLPELADISDKVSSLAE

SEQ ID NO: 166883 - protein, 83 aa, Heterodera glycines
GRRQYYIDSSKTRKRSPRTRVGFCQESVIELAERRLAPSTNRRIAWLRTEILTEWRSNALLLLAVRVLTLWSNLCSVAMFSML

SEQ ID NO: 166884 - protein, 126 aa, Heterodera glycines
PSGGMAMSNALTSLSRDRFCSSNSLKNDSSNYFSFLTCSCSSWAKNSSYSLQMMPFSSVSTIRICSNRRSNHCRAWAIPSRISGCSPFSNECLSNSNGKRKICARLLIITVSFCKLNADPLPRAEE

SEQ ID NO: 166885 - protein, 66 aa, Heterodera glycines
PPPIPPPYGEPYIPRLARRAAGSLSTLSSCAVISAEKAHKTTKRKAMIKRRGDIINRRCSSNLLLV

SEQ ID NO: 166886 - protein, 107 aa, Heterodera glycines
TQDNEGSPVTVQGEISGLEPGLHGFHVHAYGDLSNRCTSPGPHFNPTNFFLGGPQDQILHVGDLRNVHAGSDGIAKLTFSDHLITAVRAEHLVRHPLVLAQSQEHLG

SEQ ID NO: 166887 - protein, 100 aa, Heterodera glycines
NSNNSRIAEADNGSSFDMDTDGARQWDENEDDDMDDDELIRRQDMLLDTEPVNHHEVHCPYFPGDKFEWWYLFLLERKTRRLVTMVQPCKTLDQEKTHLR

SEQ ID NO: 166888 - protein, 94 aa, Heterodera glycines
MTTGGANEPRFHVLAQLEHLQSKYTGTGHADSSRWDWITNQHRDTFASIIGHPDHLSMMAICENETRARTKYNMLCRMVQPCGPPPEKSALDDL

SEQ ID NO: 166889 - protein, 180 aa, Heterodera glycines
MDDYAYLFKVVLVGNAGVGKTCLVKKFTQGIFPPGQNATIGVDFMVKNVKVDGEKVKLQIWDTAGQERFRSITQSYYRSAHAIVLVYDLSSQPTFDCISEWLLEIEQYANKRALRMLVGNKLDREEEREIPTDVAQSFASANAFHFFVETSAANDANVNILFQEVAEQLVSNEKKQNANG

SEQ ID NO: 166890 - protein, 109 aa, Heterodera glycines
KRKQSKQQKNVLSFNLAHFRFVVFLLLVFASSLFAFCFLRPPPSLPHHFFLQLLLRLFAKVGAHQLAQSHSGVGAGRQIETDFQCPPPFAVLLLLLSVMALLLKWRNEF

SEQ ID NO: 166891 - protein, 128 aa, Heterodera glycines
PCHLCSLLVAISLFWFLSLLAISPPLTMALSLFPRQNVPKMLHSPFLQQHDNNNNNNVRGPLGYSDQLELLAHSGRMAKKCRHDCSISDPTAEKCWNETLAFYEQTLFGVLRRVILVETNRILWMTGQ

SEQ ID NO: 166892 - protein, 193 aa, Heterodera glycines
QLNTLSQQKQVTLNVQVPKTPTRLFSLHTLPMTFVGTENVQNARPQQRSAFLHFGEQCKAVQNQQLLSMAMAFDKHSDTEQSLLQLPFHVRGILHRPRRMDKLKEWVKVLLSTENHFQLSLVSTSSLSPHEIAFSIGWDLSRPQPTISEALSHIGFKEWPKAFTSTASDIERKDNENEETEEDDGQWGTEATA

SEQ ID NO: 166893 - protein, 107 aa, Heterodera glycines
  unsure (1)..(107): unsure at all Xaa locations
KSQNLCGGTALKMAADXKKTSKSWAQNSTNCSCSLLPDGGGGATAIHGQGAATIRGVLHRALFFFVFVQRRSIRRRRRLRAARRPVQSDAAAILCAATVVLPTNLCP

SEQ ID NO: 166894 - protein, 139 aa, Heterodera glycines
MNSAGFVLLLWNIVNLLIVCEGNVLKEKVDKSFASADLLVAHVNGQQSSWKAKLNAKFAKMTPEEQQQLMGSRRPFLEPITKSTKQQNGKPRLNKADIPLNFDARQHFYKCADIIGKIQDQSACGSCWAVSVPSAITDR

SEQ ID NO: 166895 - protein, 212 aa, Heterodera glycines
MSTISSDQLDKLENVFEIRKHLNASEQGRLGKAIGLTEEQVNEWFEQRRNRWREEFSCDYQEQSPQNVNKTEAAEQKVVAQKQQMLSADQFAVQSECATVWEPLNLRQEWTISNFAKALELATPGICMRGKKLWDTSMPYICWQLCLYPGGKREANSGNVSLFLKMSTTHPAHELTTVRAEYHFFFVDEQGTVKFSNTNTADFNVKPSKSSW

SEQ ID NO: 166896 - protein, 158 aa, Heterodera glycines
DLHNQQWKEQQEDYPLHLIVSRMMFVYGDSDEPLNICQEFMLDLLCKQLKMLLDKAHKLSIERHSPSVGFPEFMFAFRRHPLLIRKLIGYMRLVDLMPAMFREEEQKIDDSEDILPLSSSSSLNIQNSLDDLMKLKNTSKVIVAVRLIDVMDHLLADI

SEQ ID NO: 166897 - protein, 30 aa, Heterodera glycines
FFFFFFYNSLFLIVSLCTQFLGMTSDECSS

SEQ ID NO: 166898 - protein, 119 aa, Heterodera glycines
  unsure (1)..(119): unsure at all Xaa locations
MTNMSDNAPEPNVDSIIERLLEVRSSRPGKQVAIPEHEVRWLCMKSRDIFVSQPILLELEAPLKICGDIHGQYYDLLRLFEYGGFPPEANYLFLGDYVDRGKQSLETICLLLAYKIXVP

SEQ ID NO: 166899 - protein, 108 aa, Heterodera glycines
GTVSAAPSSSARILCFDHIRFWVGNAKQAAHWYCVNFGFIPFAYRGLETGSRKTVAYAVKQDKIFFVFESALLPNNGEMSAHLAKHGDGVKVSSPPFSPSSAFPLPFH

SEQ ID NO: 166900 - protein, 141 aa, Heterodera glycines
  unsure (1)..(141): unsure at all Xaa locations
VVPTVGHCPPSRDGHSAVVNGDFMFIFGGFEEREHRFSQETYAFHFPTRVWKKLKTEGESPQYRDFHAACVLGXKMYVFGGRSDEMGQLHTSHDVYCDKLHYLDLKTFQWHRPEVKEPTTAPCGRRSLTMWTYRDAIYIFG

SEQ ID NO: 166901 - protein, 175 aa, Heterodera glycines
NVDDSYIINPWELLRKAIQEIQRKNNSGLSFEELYRNAYTMVLHKHGDKLYEGLKEVVREHLQTKVREIVVEAINGRFLEVLNRVWADHTTSMVMIRDILMYLDRVYVAQAAVEPVHPLGLRIFREEIVDYPAINEHLKATLLGMISLERQKEIIEWIDLKNVCQMLIALGLDNR

SEQ ID NO: 166902 - protein, 30 aa, Heterodera glycines; identical to SEQ ID NO: 153355

SEQ ID NO: 166903 - protein, 157 aa, Heterodera glycines
KKDEIEVEMKKKRTVRPSQTATRRRQLDEPTRRRTSASPSKIRASNANIERAKKAAAAAESRFSTPAKMTPAEKSQLQREQQQQKRNKEAEKQMEAKLAIVQQHLQRQIEREKNLAVRNTLWNREAKMEQRIIQRFRAYRAMVDKEFRAAVHQGATI

SEQ ID NO: 166904 - protein, 114 aa, Heterodera glycines
SVERKLVLCRLFAFHRFYYATFGHWLSIPCSSTIFGKRTAAAQIGKTFHQIGRVAESAAKETVRTPAEIAPFRWRILFQFSARSFVCLRLCGDYCFCVVQSSDCFSEVICCAAA

SEQ ID NO: 166905 - protein, 140 aa, Heterodera glycines
IDANLLTAFFHMSHHQQHFPPAMFKSDRRLLSAPYQSRNAERMQRRIGHGMGEHSRKFTSNGNSFCTFEGLMEVAVEIEVKETTENEGTDEANGTANSKPKMAQEKPKRQQGGGGRPFVGAISLCRRIWPPPKAFRRFSD

SEQ ID NO: 166906 - protein, 80 aa, Heterodera glycines
  unsure (1)..(80): unsure at all Xaa locations
KETGENRVYTVLFAITVIFFLXTIPSPPGTIFISDRHSQSLPFQIFRSASNLLEITKFALNFYLYCLINPDIRRVCLRVL

SEQ ID NO: 166907 - protein, 134 aa, Heterodera glycines
RIMANRRVEEQRQTLTKEPKKKVFERDFLRMATLTNDVMFLRRTLERDDLSELLLCLFGSFTCEKAFETAEHLEAFVAKHCPSIRIETVGLGADVKKFFHWDPAGDQPQKNGLDRMANGTAINETFEEENESEN

SEQ ID NO: 166908 - protein, 179 aa, Heterodera glycines
MAAIRKTLNFVSGNKQKLLELRLLLGDEFEIAPLDIDLPELQGDPADITKAKCAKAVDATGGTLKVIVEDTALCFNALDGLPGPYVKWFLAKLKPEGLHRLLAGYNDKSAYSLCTVAYSEGKDKPIHLFTGTTNGQIVEPRGPREFGWDPCFQPDGFPKTFAEMTKEEKNQISHRAIAL

SEQ ID NO: 166909 - protein, 122 aa, Heterodera glycines
  unsure (1)..(122): unsure at all Xaa locations
MGVSFESRPLSVGDYLWVLQRTNWEGKRQELVLDYVVERKTLDDLRRSIKETRYLEQKQRLKXCGLRNVVFVLEGGTTANDRQLEQAMVSSGVESGFLVHRTPNVQGTAKFLQNLTRWLRER

SEQ ID NO: 166910 - protein, 189 aa, Heterodera glycines
MPVKILIFSILFCVCLQTVELGFNGQLNQDSQNNGQLTSTVQEAQGGTFGNQNQATNNGQFKNGQLINGQSTITSSNNVQLISPVSQVQQGTGSLKNVGEGTGLSVNRQQLISTGAQVQQGAGFPNYSQFNAGQGSLNNAGQATKSSINGQLINPAGQVQQRIGSSNDYQPNNGQLINNSDQGKINGQV

SEQ ID NO: 166911 - protein, 81 aa, Heterodera glycines
ALPLPTKHSPNDGDCVRFPNSARQWRSNACAGLRTESTGVRAGRTTLSRTFAQSEHQRMGRHFDGGPSKSVLAPMTERRDK

SEQ ID NO: 166912 - protein, 207 aa, Heterodera glycines
  unsure (1)..(207): unsure at all Xaa locations
MKYTHAITIRMPSSLKFDDKKAKSKIDFPLALRQHQDLTETLTEAGIEVIELATAETEPTIPSLFADDLAIVINGTALLTRPKSNNNKKTPVVSRTNEFVSVLNSLTWQVVEAPLQIHGRSVVLEGSDVVFTEKEIFVGIRKNGTNTEGALIVAKTFADYSVIPISIAGTLPLKAHISVATNEILSVGRDKDSQAILSXIERDATFR

SEQ ID NO: 166913 - protein, 105 aa, Heterodera glycines
SCMDWLVAIDTWEYRGHTKCITEDQKYLCARHVPKVNKGELKQDAWVSQVRAAIRQVDQPRLKNLLRSVQCHTNLPRKEAQYVVFLQNSMRIRDRALWGDAWNGV

SEQ ID NO: 166914 - protein, 179 aa, Heterodera glycines
  unsure (1)..(179): unsure at all Xaa locations
MGLSISKLLSSLFGKQEMRILMVGLDAAGKTTILYKLKLGEIVTTIPTIGFNVETVEYKNISFTVWDVGGQDKIRPLWRHYFQNTQGIIFVVDSNDRERVNEARDELQRMLNEDELRNAILLVFANKQDLPNAMQAAEITEKLGLQSIRQREWYIXATCATSGDGLYEGLEWLSNTLKK

SEQ ID NO: 166915 - protein, 156 aa, Heterodera glycines
RVAILDFGAQYGKLIDRRVRECNVCSDLLPFSTTMNELVHNGYSAVIFIGGPNSVYVDNAPVYDPELLGGRLPLLGICYGFQLINKHFGGSVSLQPRREDGRTQIQVSPKSDLFHSLKPDQFVLLTHGDGVTPGNVSQKWVSTNWLHRGICGGHRK

SEQ ID NO: 166916 - protein, 173 aa, Heterodera glycines
MPAQNFVTNQQRKNDYAADHQTMLNTLNPPPKTIKLSARTLDAIALAHQEVNVPKYSRASLSAGIVHFGVGNFHRAHQAVYLNELFNMGQDLDWAIIGVGMTSSASANSKKKCMLEHDFLTTVVEQDGMAQSAHVTGCMIDYVPAGNPELVVAKLPHPALRIVSMTITESGLF

SEQ ID NO: 166917 - protein, 182 aa, Heterodera glycines
  unsure (1)..(182): unsure at all Xaa locations
AFGDGSLFVEKFVERPRHIEVQIIGDHYGNLVHLYERDCSVQRRHQKVVELAPAPVLDPAIRQRMLDDALKLTRHVGYQNVGTVEFLLDTKGNHYFMEVNARLQVEHTVTEEITGVDLVQSQIRIAEGKSLEDINLRQDSIHVNGAAIQCRVTTEDPGXGGFHPDSGRIRAFPRVPRGGAVA

SEQ ID NO: 166918 - protein, 44 aa, Heterodera glycines
FFFFFFFRQYLSHIFSTKLKKQHKYLMNRGKMSLTMEKESNSKL

SEQ ID NO: 166919 - protein, 46 aa, Heterodera glycines
FFFFFGMGKRSNIHIDNKDKRIWLLKFKRRECLVDKEAEWDPIEVG

SEQ ID NO: 166920 - protein, 157 aa, Heterodera glycines
FSLMDVNEFGLAASSSLLTCEEIAEVFLHLTVRPRPQCRFSARGFRANSRSKHIVQRFSALSSKRCTRRENKICFTADRDVLISGVAIYGANQSGSRMITDDSTAKTNWEHKIAIKLELVADLYGSPLEQLASNELLMSGKFGDPTPLVAQFAEPVP

SEQ ID NO: 166921 - protein, 170 aa, Heterodera glycines
ERATKTGLAAEAQQKIHSKFDLELSKQIFGWISQVTGESFTVSGEVEEYLTTLKDGTGLCQLENDLSPNSIKKINTTNYPFKQMENISFFLGFAEKYVNKSELFQTVDLFEGQDPNSVLICLVALAQKSDKSFGKGGLGPIEWEGSNNEWTWEALRARYSIHLLANGLNK

SEQ ID NO: 166922 - protein, 84 aa, Heterodera glycines
LLFDQLHNCRSVVTSFCFTVSVVCLFSSVCSDEFLIQFGISFAPHFFANAFRRSHDVLLFPLLQHRRCYCHSTVRRVRPTFDQK

SEQ ID NO: 166923 - protein, 94 aa, Heterodera glycines
  unsure (1)..(94): unsure at all Xaa locations
LCCLTLHTLVKIRASRIFSVSQTNLYWQKSGSYLAAHTERYHKMVKNKEGEVKYTGNNSYLEIFDCTDKEYAVQSIQLPEPFXNLAWEPKGNKF

SEQ ID NO: 166924 - protein, 104 aa, Heterodera glycines
MCRPPIENISAGRRYSKVIWRSLKRQRPSAVCFDMDSTLIKEETLDAYSSFFGLDLGGSAITEKAMGGQIGFRKALALRLEMLKATKAHSDHFLNNFPPHLAIG

SEQ ID NO: 166925 - protein, 97 aa, Heterodera glycines
MQLSELSVAFVALFLTSALIEITEANAPKQNSGTDTNAEKEENVCLLKKHEGSGNGHIRRWWHDKADGECKAFFYKGRGGNGNRFVSKALCERRCNK

SEQ ID NO: 166926 - protein, 153 aa, Heterodera glycines
MESLENPQGLSFLAQSPQFQQLRDIVRTDPSMLPQIIQQIAAANPQLMEAIRNNQGAFLQMLNEGQPLGGGTDAGAGGEAAAGVQQEAAQRRVSIPVNAQDRLAITRLVSMGFPEALVVEAYFACDKNEDLAVNYILERMDESQNERAGAGQQ

SEQ ID NO: 166927 - protein, 51 aa, Heterodera glycines
FKRSHKLRAGQFRREEIIVSKRSIFINELMKNSLNSFYQFFNKIHDKQIWI

SEQ ID NO: 166928 - protein, 90 aa, Heterodera glycines
CDLFAVNVNICSGSCWSLSFVDPRQSKGAESEANANGNEPAVAVFAQCCRMVEAQMLNVSIPCEDGSKTVQIPSATNCSCFDCSRKRRRR

SEQ ID NO: 166929 - protein, 130 aa, Heterodera glycines
RSSPRSQKKCCCPPMPSPSHFSVPPSHSVPSSHFSVPPSHSVPSSHFSVPPSHSVPSSHFSVPPHIRSQPQAASSTICNRRRRPECAQFQAQNGCSIHRRSSCCRFLVHNRTHIQPACSGQRSSLRRSCC

SEQ ID NO: 166930 - protein, 110 aa, Heterodera glycines
RNVLSFDDYSQYRIITVLLHRPQGINEGAVGLLLRTMAERSKPANAPFSILVHQVTGGSIASKNGHLMQGDRVFFIQHQSTVNMSVAEARSLVKSPSPVIHLVVGRGRFL

SEQ ID NO: 166931 - protein, 19 aa, Heterodera glycines
TFSFSSLALPNTHTIFEML

SEQ ID NO: 166932 - protein, 99 aa, Heterodera glycines
  unsure (1)..(99): unsure at all Xaa locations
TTHIVDMLTISELSERYPDHKFIGEXNVLAGNTYELTDAPTWIIDPIDGTTNFAHRIPFLGICVGLAINKSLXSWDRFRPITDELYTAIGGKRPFKNGF

SEQ ID NO: 166933 - protein, 66 aa, Heterodera glycines
MSLLLLSATAEHLLVLSAFFFPPALLIVLLVVVLATFGKSLGLRERYVSILIRIFEWGAGEIQSRR

SEQ ID NO: 166934 - protein, 103 aa, Heterodera glycines
MTSTLRGFCLSPADQQTNLFSFCSEMATNASQKRKEIYRYKASFNVYAMGWSTKLFFFLKFRLAIGSFIDEYHHKVSIGHLHQDQGQFGRLGTFDHANTSTKR

SEQ ID NO: 166935 - protein, 58 aa, Heterodera glycines
  unsure (1)..(58): unsure at all Xaa locations
FKFCLVFSYFPFFSLFSFFFFFFFSPPPPPPPSFPPXXPPXXXPXPPXXXXXXPPPPP

SEQ ID NO: 166936 - protein, 105 aa, Heterodera glycines
  unsure (1)..(105): unsure at all Xaa locations
IVLGIASVRSLLAIIATVVTLPSLYSEMSQMNSKVRDGVEAFRVNTDXAXTDLMDAQVVLTTPSNPRDNPLDSFFXAKRQLSAHCQRVFPPPSTIIPHGPSLPTP

SEQ ID NO: 166937 - protein, 170 aa, Heterodera glycines
  unsure (1)..(170): unsure at all Xaa locations
MASTHEKRTDSRLVFVPFVTFADPLFWNEINRLKVDHWKLDESLKPIYATTTFQGAQPSDGLLSFDQFSIAAESGQTLPLQSVQPFVSPFHGTFLLLNTKKAFSDGFDRKKFLEQSADSLWKVIESKKWLTEAQLLNSFLLTAXADVKNFTYCFWNCVPARLLPDKLREN

SEQ ID NO: 166938 - protein, 178 aa, Heterodera glycines
NKNSQLVLKWNYKRSAMSDNEDELTGIQRRRRLTEGTDEKSRFRPPLTPSNSLLLRSPPVIMITSPSLPNSREEHLAEQQVPSSNGNGTSSSASSSAGTTRVNHPPQPFPVPLQRRRSSCSSSVSSPLGSAAFHPRYSTPRLSITSLGSVAKTFRNIAAFIVPEEEGERERARDRLRK

SEQ ID NO: 166939 - protein, 137 aa, Heterodera glycines
AKCLLHGPSVVRLLPHSLKISRSFAVPWRQFFDKLKADRINAQVKHKPLDDDHKRYADDEWHWMPTGESDIQNQATVTFLSRILKKEKLVAIKTISKFGFRTHENAYLLGPIAVFPRTVLSWRVPMPADITPESLEL

SEQ ID NO: 166940 - protein, 110 aa, Heterodera glycines
MQETHIVLGIASVCSLLAIIATVVTLPSLYSEMSQMNSKVRDGVEAFRVNTDSAWTDLMDVQVVVTPPSKPRDNPFNSIFFFKRHLPGHCQCAVFQQPTSAPGAAPKQPE

SEQ ID NO: 166941 - protein, 93 aa, Heterodera glycines
  unsure (1)..(93): unsure at all Xaa locations
SLEQSETMAFVLKRLIGYLAIWLICFINLFSLQKIAARFQVILTVLKLLVIALIILTGLYQNXIIFRGRTENFRDTFVFTKTEACEIVLALFA

SEQ ID NO: 166942 - protein, 73 aa, Heterodera glycines
PSLYSEMSQMNSKARDRLEGFRDHSDYDWTDLMDGQPGPTPPANPHDSPARCFFFAKRQLTARRHCLLAHPAR

SEQ ID NO: 166943 - protein, 120 aa, Heterodera glycines
AAISESPLNNCPVKVLPSFTSTFLPDLSNAQVLKPKPTNVDRLPLSNEEFITPTQPKKQQSRPFSPANGVSKLILPRSRVASIRRESDCNSEKGFGEAEAAHQKMVKSAQQVAMGFEDFC

SEQ ID NO: 166944 - protein, 175 aa, Heterodera glycines
KTKSEKDRHEHRTTEEQLRTRLLNSDGQCTELRHKLRAVEQQNDNLERRERIHTQQLIDLSERYDHCLERCAMLEAGMAVPQALPLAVNGGGINGVMVQQIDCADNQPMDFASSSVNNIVDNPSSTTDTSPEGPAMRERVRQTLNGRPTQRLIEQMLRKVEAAEAHLNISSFSSS

SEQ ID NO: 166945 - protein, 156 aa, Heterodera glycines
  unsure (1)..(156): unsure at all Xaa locations
MTTLDAKMSSSSSVLQDLLRDHSSEIGNWSEIVNNHQDESSKPEPFTNIDHNGPFYIFVPNLTLDYAVDSVNMEVYKMFGGHKNLFAVYAYRLAKKVSQSFMLMARDFESCVQVLKMEEKIVNSSSKEVVXLEYVLPSVAPPKTFHYTTEQVDNQL

SEQ ID NO: 166946 - protein, 159 aa, Heterodera glycines
RSEMAAVDQHQQQLVERIKQLDTLSTTADEQFDNSLNVPIGDLCRLLLAALAGDELAAGEAKKICPPSSPFANAIGSLAVGCLRDGIGPDGLAMEIQQLNSASTGKGNEMRNAFLEAYRSNFDQLKMALAKSTGTFASGGSAYPKVVGMDWSILSVIES

SEQ ID NO: 166947 - protein, 68 aa, Heterodera glycines
VADLGEIEDDAALKSSSIAAEHIDHGIFGNVIQSSKDAAYLARHIGLRVGVPDHVPAATANKICGSGF

SEQ ID NO: 166948 - protein, 143 aa, Heterodera glycines
QGFFGFSKQKAPPPILVEAITIIVARGNSVKKKIKNWEGDWENLRVPLKKMKEGPAKNLAPKRVFKFMKQKGFFENQGNHLPAHSLIMEQTIFEFGGMKNPQGPAPKRKEVLTSMTREHKSADFARTDPLEDEMKKLLQMISQ

SEQ ID NO: 166949 - protein, 159 aa, Heterodera glycines
  unsure (1)..(159): unsure at all Xaa locations
LISSLVSGLLTIGDRFGGALDGAAKSFSEAMDTGLSAMQFVNEQKRLGKLIPGIGHRVKSINNPDKRVEILKEIAKNKTFFXQETPLFDYALKVEQITTSKKPNLILNVDGAIATIFVDILRHSGMFTPQEARETIEIGSLNGLFVLGRSVGFIGHYLD

SEQ ID NO: 166950 - protein, 81 aa, Heterodera glycines
PCRTPFQRVQNYAEEQAELNDGVARLTNGGPILGGVVVDLVFSDLRRWRSVAIDRKGQQMGLKGQNILFFGRNFYIFIKLI

SEQ ID NO: 166951 - protein, 179 aa, Heterodera glycines
  unsure (1)..(179): unsure at all Xaa locations
MQETHIVLGIASVCSLLAIIATVVTLPSLYSEMSQMNSKVRDGVEAFRVNTDSAWTDLMDVQVVVTPPSKPRDNPFXPFFRAKRQLPGHCHCAGLQQASCPPXPPGPSVLPGLSSTPRNPPTLIRRPAPPRHPPPASPFPVVPPGLSPPRTRHPHPICNDPPPTDDLRGSPVLCQAAPP

SEQ ID NO: 166952 - protein, 93 aa, Heterodera glycines
WYFHFPPFFSMPTTASSTLDKQLKACGRLLLDYCQANLIYTTDLDEISKSDLFNNRRLNRHLDLSCFPGVFYFLELHKHVECNDKDKTRCDIY

SEQ ID NO: 166953 - protein, 73 aa, Heterodera glycines
FFEIDCFANGKIQFSIFWVRFSHVVWIENLNPIGVRVRDECQASQVVRRFEGQIQTDFDHARNRLMNDICLQN

SEQ ID NO: 166954 - protein, 92 aa, Heterodera glycines
VNLKSMFIAVHAGAGFFAESAEKNCSEALKHAVDINNRPTDNGKQSEIGLGGDGITYSGAAGDCPLVAAVMFLERCPALNCGLGSNLTVAGS

SEQ ID NO: 166955 - protein, 21 aa, Heterodera glycines
VILNIEDIHYKLINAIIMVHF

SEQ ID NO: 166956 - protein, 50 aa, Heterodera glycines
FIHSLLLLITWAGNFVEKPIVFVIHKNRTNANSIPLTITRESNYMHMHIF

SEQ ID NO: 166957 - protein, 45 aa, Heterodera glycines
KKKPLAALTSVDRMSPPPAPPPKAPLPPPPPPRNPPINSPAISAN

SEQ ID NO: 166958 - protein, 154 aa, Heterodera glycines
MQAPDWGNYDTNGTDYDYIYNNSDERDNWNSEQAGVFRHLVTQLGTTQTLQNLALPTFVLERRSLLEMYADFFAHPDELIAGAYENTAEKRFLAVLKYYLNSFYPARKTDAAKKPYNPILGEVFRCRWTLPDVPLSASRTAGGPFPGSATNQMT

SEQ ID NO: 166959 - protein, 78 aa, Heterodera glycines
SKCQSILCPFLAVMNELLAIVLIVLLCCAMFFAWLFALATCPDRLVNLISGTKSSSSPISRASEDNGTRKGSSRWRFG

SEQ ID NO: 166960 - protein, 85 aa, Heterodera glycines; identical to SEQ ID NO: 138989

SEQ ID NO: 166961 - protein, 156 aa, Heterodera glycines
VLSYEPELAVLAASAYLSDVIYAIRASEAALMKKRKGPAVTSKAATILVATTYPAWQEELLDVIRQVYKGTGNDWKGKDLAALKAAGLLKNKKAMPFVNEIKKQLAIVGEEAFNRTLAFDEEQVVRENLLVIQRRVGFDLIRGRVDDRARGGVMRR

SEQ ID NO: 166962 - protein, 217 aa, Heterodera glycines
IWTDTLQAGFIYGGLAVIIVRGTAQAGGLTNVLAINQRTGRLWSAFRVHPSLLQYNNLWVAMFGGILQWTCIYGLNQMAMQRYCSMPSLRHARVVLSLTMPANLLIQLMIGYIGLLMAAYFDQCNPLALGEVETVDQVTILMASRIFEGVPGLPGLFLATIFSATLSTASSGINSLTAILWEDFLKVPLKDLSDAHKSCAMKGISVFFGALATVMAF

SEQ ID NO: 166963 - protein, 140 aa, Heterodera glycines
RRPTTANKAVPRRRALRRHRVSTAASLPPAHLRPLLLKKQWRQSERSDGRHSHRKFSWSATRRAEPAAMRTKRRRAAATEEDGETEAETDETDAEERRKGKEMQSQPMTIFYVYEELIMHFLIVQNVCDLLSSIVDFFKV

SEQ ID NO: 166964 - protein, 175 aa, Heterodera glycines
  unsure (1)..(175): unsure at all Xaa locations
QRKICLIPISAHGTNPATAHMSNFRVVPVESDKHGNINYKDLSAKCEKHGAELACAMITYPSTHGVFESNILDVCQKVHEFGGQIYLDGANFNAQVGLCRPGDYGSDVSHFNLHKTFCIPHGGXGGPGMGPIGVKAHLAPFLPGHPIVPIKGNRSGAVAASPWGSSSILSITWTY

SEQ ID NO: 166965 - protein, 143 aa, Heterodera glycines
VRLLWHHLFCRQCWSNYLSCKILGEGRPYVTCPELRCTIVADDEFVLKNVDNKQALRSYHKLVLNSFVECNTLIKWCPAPECGRAVKVPHSEPRKILCKCGCLFCFSCSQQWHEPINCDLLKKWQKKCIDDSETSNWLSANTK

SEQ ID NO: 166966 - protein, 175 aa, Heterodera glycines
QKSQITFAPVSSYTLRKQKRPISRSTEEPPPVLTKGSETEFDNCEEPPPPLLEAETATDGDGSEHDFVQNGSIKSVRDLSVIMTSAAEIGRAAEDSAAGCDPPAEPFILESRHLPSWFRNCPGCHPDQNSELLFRGRIAGGPQSGPIVSIECAFCGSRFITAIVTGNGDRRGLKV

SEQ ID NO: 166967 - protein, 193 aa, Heterodera glycines
SCRGHHVQPPAHQRFGAVLSPTPPPSAYPSAGVVISSKVPPFFRSVPPASPFVCPAPPSVVLSQPPPMGSPLPQRAQLSRAQLLSRHSRDVEARKFAVKLYHLQRTIKALVYKNGALADELARLNQRINTVTTERKMLAKRLQHHERNRIRRIQSQYRKAIAAANNKQQSNAVEALLDEFGGEGRNVAQPKKS

SEQ ID NO: 166968 - protein, 123 aa, Heterodera glycines
SHHHRFVLHDHGHAQKLRSAASPSNPLVPAAICSNCLTLLSKAHRCRGRNGVKRHKQQITTMAHTTTRASKTETPMMIHNLTLRPAISFVEVFSSVGFLSLTRGAPWQQLKTIRVMNNRRRAF

SEQ ID NO: 166969 - protein, 135 aa, Heterodera glycines
  unsure (1)..(135): unsure at all Xaa locations
TFRLLYDVKGRFVIHRIQSREGQYKLCKVKKQAVGDKQVAYDARTIRYPXPHIKADDTVVIDIGTGKVTDYVKFDAGNICMICGGHNIGRVGIVGHRERHPGSFDIVHIKDSAGHGHSFATRCGIISPICSTIFR

SEQ ID NO: 166970 - protein, 143 aa, Heterodera glycines
MDQIGGTFSDQIWLDTLAWIGRGEVGWHLALVNARFAALVNMQLQQRRWCLEEFHISERKPKRTGAEVLSLANNGSYFSLPLATSPLPDSVVGFNGTFNIWYLDAEVINFLQRFRRLFNTYISLKFTIPITEFRAWQAVARHI

SEQ ID NO: 166971 - protein, 47 aa, Heterodera glycines
KKMEFLTLIKTEKESAIQAYKPMSQLNSVSQKKEKDRQTQQLLVIRK

SEQ ID NO: 166972 - protein, 159 aa, Heterodera glycines
QLVANFAAVFAAPSHFAVVPKMCREKQREKATEKVPRYYLNLMALSSALDTVGFGSSAAVVAKHWPNFGPTRQKKVEGGKRCPWTYRLLREKCRLCVALTDSDGQTTGTRRRRENPPGEGAQRHPKTAPFYDGGQRPRGHSDALLKLSSGERRTSMKNG

SEQ ID NO: 166973 - protein, 190 aa, Heterodera glycines
HSSRNVFAYFVSSDTSQPAIFFRDPHVEDDLRYNGPLDNLDSVKKWLTDKCVPLVREITFDNAEELTEEGIPFLILFRIPGDLQAERTFTDIVTTELEDQKNAVNFLMADGKKFAHPLHHLGKSERDLPLIAIDSFRHMYLFPDMKQFGVKGHLRQFVLDMHSGKLHREFHQWPDPTEQPAPTTTQPPAS

SEQ ID NO: 166974 - protein, 152 aa, Heterodera glycines
AVEKEEEEYGSKQLIPCAPYARLLLFGTPSAIQSAQLAQLRALVPGAQLAVANCRPGLDTDEAVEEEIVALGASHLVFVHGADGETRDAWEAGGPANLRENVRVNLFSPWLLSNICDRFGIVFIEFDGEGKNCCNSNGKVPTNADALQMSRY

SEQ ID NO: 166975 - protein, 200 aa, Heterodera glycines
MAPVKKRKKLSSTDQRPISATVTNQQKPLGSFVTFGKRRSLRVAMKTKSRRWLCNDIWMDILPLFRRPQLGRKLALLSPRFNALVDKHFDSKNELTILKQIRIARNGTKLLSVVTKSNPLPNKIRFDNLRIEYIDHSVIEFLRSNKQIFAKGTNMDLYLDFDDVYDNNGIVQPIWSVFAREFWPIFAPNIRHLTVPIGHQ

SEQ ID NO: 166976 - protein, 155 aa, Heterodera glycines
PTFCTHPKFFLWDFISDHSIHSLSFFPLFQDILLSLEALLRLCQTPVVAAGILHYLKTLLLREDLLAEPSSLHFALIDQIARVHPNLHSRVFNLLCDLYDHQSNRNEVAEVVMERQRHVVERFVHLLCCGMAISVVEKIIAMFKAGHIDISLVRY

SEQ ID NO: 166977 - protein, 166 aa, Heterodera glycines
ILSGLVYDGDSLLRIGNGICASTFPIERKPSGGHAADNSTVSAFVTVAFHRDDDIKRSSAECPLLWFGHRLATIAQGHAQFHSLWHFPLFSAHPNPSESLRETLDTINRLGQNEPQKSDKTKPRSDQQLLSIEEVLQKVDAKKLREMREKFIKMPMEEKESGKPSK

SEQ ID NO: 166978 - protein, 120 aa, Heterodera glycines
IYFKIQNKMVIDGLRDCLLQVLRDYALRVGLLEHSNSVASSDTFALFQRRLRPEPFVAGTHGMVTELRCEICFDPLVSPSASAPVGDVRLLVNGSAVHEKCHGQKQMPNAKALYEERRNE

SEQ ID NO: 166979 - protein, 183 aa, Heterodera glycines
KNQIMTNLIICRRLLPLLLLLSLLNMVMVRLQELAVLLAQHTERVHVRVRQPRHRVNVTRALSTDCAHAELPWLQLWKALLGWRWFGHKCDEMLSVPCPQLAHTRPVQRESLCRFLMALPPLQFHVLKTLQRRNVQLGRMFCFLQPFTLRLRITCIFGHRFPIDAGNGPIFVVLQPIAFGSIA

SEQ ID NO: 166980 - protein, 203 aa, Heterodera glycines
FQRPLELGADVVMHSLTKYINGHTDVLMGAMVTNNDQLDQHLKSQQITAGAAPSPFDVYLVIRGIKTLHLRMRQHMENALAVARWLEKDPRVEKVLYPELESHPQHKIHKKQSSGMSGMVSFYMRADADRARKFLANLKLFTLAESLGGFESLAELPAVMTHASVPEQMRNLIGISDNLIRLSVGCEDKTDLINDLDMALNLA

SEQ ID NO: 166981 - protein, 79 aa, Heterodera glycines
  unsure (1)..(79): unsure at all Xaa locations
PACPPGEVGAPGIPGHPGAPGQPGTDGQSCPKGPPGGPGQPGNGGTPGHAGQPGQSGXPSDSNGMCPLYCARDRGWLFE

SEQ ID NO: 166982 - protein, 216 aa, Heterodera glycines
PLFAACQINFAIDDTLTIFNSTLEPILRNIWPMIATNVCAIQLSAEVFRRLRHFEPSILNDCPSLRVFNAYYFGFFTQFPCDDSAAASDGQTVAKWLFTPRPDDVPKVFKCWLQWDDGHLASSIEDFKREFTNASSPVNFIAVIRFPPTFADSVLLFDLTNGFTHEQLTLTWMNDIGRFLLIRRPIVRDTNKWAKWEKEAIGWQFYDQWNRIDIRS

SEQ ID NO: 166983 - protein, 86 aa, Heterodera glycines
  unsure (1)..(86): unsure at all Xaa locations
THSALESASVRSVVYIIHTGHSVISVHSDKTHENNKARHRLEVFRVHTHSVYSDYIDAQGVETPAXNPRDNPLIYIFCAKPTVPRL

SEQ ID NO: 166984 - protein, 181 aa, Heterodera glycines
NSVSNGEYADCDEMELDEPFSESEGEDFPQAKGVEKPCLVIPRGRIRSLSGTIPPVGFAPHWGGPTMCLSCFQFFQLPEMICEFSTHLLTEHQIFIDGMDIIVDLKRYIEYWRQQFAKRNIAEIFPKICPKPEDDVFGKVGFYFLMDESVKEDYGLRQRLAMRRLEEALACQQREREDSVF

SEQ ID NO: 166985 - protein, 156 aa, Heterodera glycines
MDAVFLEKLSEGGLLNGEQLNELDTDEVRKLVEIQFRKDGATLRGVEHLIIRVEAKVSRNELRLLFVFYLELLRQCVVQNSEMDDFCSDQTTRQFLLQFQFILTEERADDRQQNWVQLLLGEMICKMFVEMGRTAAASSASPFCYEIAKQHISALL

SEQ ID NO: 166986 - protein, 205 aa, Heterodera glycines
DYIHRVGRTARMNRKGEAMLMLTPSQEPFVALLRQRNVPVTKVTVDSNKVFDVRNKITNLMVPFPSVKQFAQQSLIAYAKALYFSELKEVFDVQSIDFDALSRSYGLVVTPRIRFLRKKGIMTRKYVEFEKGTSPEMATKTEEILLGNPSGSGGKNPFDIQCQNEMEEEEPFLKVSRRDVFNSITEVDMKEEILSRISSKKPISK

SEQ ID NO: 166987 - protein, 97 aa, Heterodera glycines
  unsure (1)..(97): unsure at all Xaa locations
AAVTFDVNELDLSPYVHEKSPLFNAAFSLYAITVMTKIILLITLICLKTPLXHSGRLNSGHYTSAVVNLISTDREWLSFDDESCMPCVAPSPTVRIS

SEQ ID NO: 166988 - protein, 108 aa, Heterodera glycines
IEKQQTQQNPKAETASTKLPLDYDLQRVAAKAAGNVYAWLPADKQPKKLADIKPAAPAAPLPPADYDVERVAEKAAESVYSWLPKELQPEMMTEDERVEFTAEVFQDI

SEQ ID NO: 166989 - protein, 138 aa, Heterodera glycines
MGSSKENDGLSVAGRAKAANRLEVTDAATRQKLKRHNLRYTDLQLTRSLLVVTTVFIVLNLPNYVYRISIQFFVISEQINLSFAAHVLLYTHHAILFYIYIFNSPQMRKRLIPTALKLLECYCLKPRHLNDFSDNLFQ

SEQ ID NO: 166990 - protein, 197 aa, Heterodera glycines
MENESQGAHLMDQLDSVIPSLVNPSECQSEKDLALFRQLFRQFLEDPHKVNWQEIQPMAKEKQMPYEHLPKVEGSEERRAILERIAVIKLNGGLGTTMGCSGPKSLVQLRDGLTFLDFALQQHRILLNCADLRSPVPLLLMNSFNTDAQTKAFLWAQNANSVAAVKCFCQSKCPRIFADSLRPVPNSWDDRAEEGWY

SEQ ID NO: 166991 - protein, 188 aa, Heterodera glycines
IVQERVLGIIQSWADAFRDDPALSGVVELYDEFRAKGVEFPATNIDAMAPIVTPKQTVFPLADDQSQQQNGKSVVQTFPKPDRPPFVPPQQFVGSVGPEQMAKLRSELDIVQVNLTVLRELVAQMKPTNDGGVTEAPEDFHFVRGLHSTCKEMQKRIVELIPSVSNEEVTLELLSVNDELNTTFEKYD

SEQ ID NO: 166992 - protein, 143 aa, Heterodera glycines
  unsure (1)..(143): unsure at all Xaa locations
PNKKKRKGGGGGGGAKEKKKKKXWGGGGGGEINNLFFFFFFFTPPHQNIFFFLPPPPFFFXXXXXGGGGRKKKKRGGFFFFLKKKKKNFFFFLXYQPXWSCFCSSVNSKLNPIENDDENNFEELENGRLNMHFDQWTNGCIIS

SEQ ID NO: 166993 - protein, 110 aa, Heterodera glycines
SPRLLNYIKFLAKKRHNFCHISFVQSSYSSCSTCGGSSYSSYPSSSYSSYPASSSSYSSYPASSSSYSSYPASSSSYSSYPSYSSSSSCSTCGLSGYSNSWNNGGSSSNT

SEQ ID NO: 166994 - protein, 213 aa, Heterodera glycines
AWGKWLNCGQTCLAPDYVMVTNEMKPRLVEELKAVLVEYYGTNPETSKDYSRVINEAHFDRICALLKNSVGIEICKMGQPNREDLFIPPTILEVQTDDALMQSEIFGPILPFLIVRSFDEAIDIIKRGEKPLAAYLFTRDERKVNRWVAETHSGSVCVNDVMLQITVDTLPFGGVGESGRGSYRGKFGFDEFTHQKAVLKRCFFGDGIAAGRY

SEQ ID NO: 166995 - protein, 145 aa, Heterodera glycines
SHLSSLGGNFRQVKACFTPKENLLSSAMRCTKRQHDNACSHSSADLFGPKRYCQTLENQAMVEIDRMIVRMGLDKSGSMKKLVSASKKLYGCLKQCMANKAGNCEKQLKCGLLMPSDSAMVQNTTSCALNNGFNTATAQQNGHLC

SEQ ID NO: 166996 - protein, 69 aa, Heterodera glycines
TDCEENWSNLWNGFNKTVKIRFDELFATTLRRYKKFFNLPNRSGANSKAQLLEGINDHFESIPVDLAET

SEQ ID NO: 166997 - protein, 205 aa, Heterodera glycines
AFSVSPSKSLSNLLLDDSPSDESADERDDQTDFCGQRQQIGDTHSHSSFVAEVVDSLQGALEDGFLRENEKAKLSGDLLNKIKLEVNASKLAYNIPAEEVPGLLFTAFLSLPGVVDKFSEFTKMYNHWRGLWKMFYRTTFAQSQMLFAIEEKASDSDRFRRVLPKVLYFLSQEVKAMDDALIVDWYSNLEEKSQLKKEEKLAELV

SEQ ID NO: 166998 - protein, 83 aa, Heterodera glycines
  unsure (1)..(83): unsure at all Xaa locations
FGPVGPPRSPGQNPRVGPXFVDPRGPPGPRGYPGVRVHPELPGXFVQPGGPGHPGDAEKPATPGTPGEIGGPGFAGEIENMGT

SEQ ID NO: 166999 - protein, 165 aa, Heterodera glycines
MDIFPHFDRPQLGLKMALLSPRFNALVDKHFDGISQLTIWNAITIHRIGTKAKLVVEENNAKFPLPDHPLRNKIRFNYLQIEYIDYSVITFLRANQKIFDKGTDLNLFMPYYDHDDKNVQPIWDDFARAIWPIFAPNIRHLSFSDAHAFGNLRRHISPTILTDLN

SEQ ID NO: 167000 - protein, 159 aa, Heterodera glycines
ILGTDLRGRVPAMITMHAYSQLWIYPFSHRRGVYPADVEELKAVARRAVTALAEKFGTNYQYGTGPETIYAYTGGSADWAKETAKVKYTYTLELRPSYWSWNGFVLDRAQLIPTARETFDGVFGGDGTSRKGNDRANGAQSERRGSVRPPFHFVCPSFC

SEQ ID NO: 167001 - protein, 112 aa, Heterodera glycines
MGSITQLSSVEQHKCALLHTNGGPAVAPAAPLTLEPLAGPDTGILVARISVPSTRNAFSRALAQAFRDMVDQLRYGLETRALILTSSVPQAFCSGVDLKERRKMTSNEVTTF

SEQ ID NO: 167002 - protein, 162 aa, Heterodera glycines
  unsure (1)..(162): unsure at all Xaa locations
QETHIVLGIASVCSLLAIIATVVTLPSLYSEMSQMNSKVRDGVEAFRVNTDSGWTDWMEVQGVVNPPFKPPGNPFQSIFSWQRKWAGNCQGLGLPKPNCPFGPPGPSGTLGNPGNPGGRENPENLEKLGKPLFLGPAKKTPPPSFLGPPPPXXXXXPSVGPP

SEQ ID NO: 167003 - protein, 81 aa, Heterodera glycines
VQPPFTETVRRDGAELIVFLESVLLQTIGFDLQVELPHPLVLHHMNCYAGGNSAISRCAYWFASEMIRLKSIRIFVSPPPS

SEQ ID NO: 167004 - protein, 96 aa, Heterodera glycines
SASTGAVPTAQKGDGVVAIDSKIEQAMDLVKSHLIYAVRDEIELLRARIVHLEATVIRLEAENAILREHIPRDVLDRICLPHHFPSGAASVASIAQ

SEQ ID NO: 167005 - protein, 178 aa, Heterodera glycines
GQPLYFTRENVTERYGEYETRKIDLWEKFMSTFSEKQKFELNRTGFVPMRPEQMRMIYGAQSPFNDTEALHRLSSLNETQIHEGMERDIHNIARLKQWRLQYHPRAEFHSRRRRAVVLSPIVSSPFVLAAPGLSQAVILSPVVLSPVILTPAVFGPFILSPWVFVPVVLSPRVLSPFV

SEQ ID NO: 167006 - protein, 192 aa, Heterodera glycines
NFKMSSAGSTNGLKMNDQQQQQESVPDSEVIRQLRAKIAELEAANLRMSSSTASFDVFSSPNGDDENDSFEGQNEQNGGEHNDKRIEQLEKMMLQMEINHQQLLTEHNSLREKMAQMEKEQRKMAGRQQNDNTELCAAFEALKQKQTSDSEQMNTVREEILVKIDELVELSINNLAFRHKFAAMENIVGILK

SEQ ID NO: 167007 - protein, 55 aa, Heterodera glycines
QLTQPTCHTVSALLSVITDPTMFDDFGQCVGRNPFECAISSMSLAVNCRVPLACS

SEQ ID NO: 167008 - protein, 152 aa, Heterodera glycines
  unsure (1)..(152): unsure at all Xaa locations
TNKLFIMKRPSSVVAFGSHLFVGFILLSLFIGTLGTEXKETKPAAAHSPADAKHPPPVAAHAAAGRGHAFDPKPASPSPLGLLVLVPRLIRPMGGPPTGAEPKMGGGSRFKKYRRGPHKVFLGVVGKKKISSRPPEKIAPREKFLRGLPWKK

SEQ ID NO: 167009 - protein, 216 aa, Heterodera glycines
MGNKQMANANTATRAFSTQSPPTAKKVANHRLNRRRSDFQQNSKRSAEQTKGDRHNNNIGTPSNGSGDLPMNSAAERARQRRRCSSAALVAARNGAIQRPKRMTPRQCHLVIKSWSKKSPKNRMAKDIFEAIFVEAEELKATFGIEKGSNGKRLRMEPNFVAHTNMFADTLDFVIRNLDDLSLVTENAEQLGRRHAAFPVEGGFKTEYWNMFTECI

SEQ ID NO: 167010 - protein, 93 aa, Heterodera glycines
MLSSSACCTLLAALISAAFFAMANAQTVKQCLCSEIQPCSEKYMNTWKTCMQQCKGHFSSVGGDVEKLGHCLDSNQALLQSTIRCTQSHGDES

SEQ ID NO: 167011 - protein, 93 aa, Heterodera glycines
  unsure (1)..(93): unsure at all Xaa locations
AGETSIANLDDLRNASGDVSTADLQLXITLRTMQKHAPCCSKRPPLLQEGIEKGRSLFGLQKXLRVSDRRLIKNSYLVETLELHNLLINALQT

SEQ ID NO: 167012 - protein, 74 aa, Heterodera glycines
FLFFYFFCVHLILIKCFSKSCELNIHFLISFNNSRPSVILFGRDLSLNTQWPNWPDDVWSWPQVMPCHFVFDVM

SEQ ID NO: 167013 - protein, 178 aa, Heterodera glycines
DLEITDDKCLAVHYKENEYGRRSVFARHSLFPESALSGIFYFEVLVKSMKHIAFIGLSEKQHQISFDETIHCGTAIYEYASGGYLWISGSSRKSNAKYSFGVGDIVGCGVNLAIRQIFITKNGHLLASSKLFVPPPPASSSSSSSVFDLPLVPFVSLFSFDDRIEANFGPNFKFDFSI

SEQ ID NO: 167014 - protein, 206 aa, Heterodera glycines
MNFLSKPAVSNSNSKVHMQTMTWKEFKADALKSDNELEREEVEPLFDPIYEKDTKRMKALIGTLSEEKRHRFLRTRYAPEGTNKTLTPLMLAAVLGTGEMVEILLESGADPNQMCVRKLKDARGSPIMTIVTPLWVGAKDGHFEVCQALVKHGANIDVGVPKFGLSPLMSACDSNARLDTVDLLIKSGANVNHSDPNGDTALMGAT

SEQ ID NO: 167015 - protein, 66 aa, Heterodera glycines
  unsure (1)..(66): unsure at all Xaa locations
GDGVGVRLGXGEEQFQRRKHSLLFGGRPKLIRRNFGPAKALCPQRVNRFGLLRFRFAIVWCEFRGV

SEQ ID NO: 167016 - protein, 159 aa, Heterodera glycines
QVFHLEKSHVNTVLEYVRHAVSQRKVHFLYEVREHGQTHTTSVPVDAFVSELTFSLAGERDDGAFLSISMVDPRNRTIEKSDYEHEQGIIDLTNVKLIRINDPLPGLWRVRTSSRLKHTLRVVGHGTIDFKYGFSSRPVPSVDLAHPRPIAGQITFLVV

SEQ ID NO: 167017 - protein, 119 aa, Heterodera glycines
MAPVKKKKKFSSANHRLISATEQQKPLGSFVTFGNRRSLRVAMKTKSRRWICNDIWMDILPLFRRRQLGLKMCLLSPRFTALVDKHFNGQSELTIWKPIRIDEKGTKASPFTKNLFPKK

SEQ ID NO: 167018 - protein, 162 aa, Heterodera glycines
EMPSNSTPFDEGKQQMAEKNKSIPSSSSISKFAPFSSSAAAEIPPEIAALSQLSISDSPKEPSVVVAANWTLWRYECRDLPEHRCQAKPCQFCEQVSKLKGVAKGKLSESTDRWDSYLKREKSYDDEHILIKVMEGFSPSKLAKDVFFNKKLGVALFRGDIE

SEQ ID NO: 167019 - protein, 193 aa, Heterodera glycines
LLFLGEQSVGKTSLITRCMYDSFDNTYHATSGINFLSMTMYLEDRTVRLQLWDTAGQERFHSLIPSYIKDSTVADAAYDITNANSFHLTAGWIDDVRTERGSDVIIMLVGNKTDLADKRQVSTEEGEQKAKELNVMFIETSAKAGYNVKQLFRPIANALPGIEVEKAAVAQQLADIGPIKPPPIVTEKGSCWC

SEQ ID NO: 167020 - protein, 188 aa, Heterodera glycines
MTSTLRGFCLSPADQQTNLFSFCSEMATNASQKRKEIYRYKASFNVYAMGWSTKLDNHLKFLLAIGSFIEEYNNKVSIVQLHEDQGEFGHLGTFDHPFVPFNFLLFLPFSYPSTKVLWIPDPKSAFPDLLATTGDYLRIWRIGGHNGASLEVRLDNNRSSEYCAPLTSADWNEVDVSLIGTSSIGPNC

SEQ ID NO: 167021 - protein, 124 aa, Heterodera glycines
ERKRIGRPLGRGEAIGRRREIGRHRENESVNGIRQPKGQRQTERVFSFSTVDLIRTEAKMVTIGHNLLSHIPYNDHMAYKWDLQTLQGTRATGMKKNYLYSIKPSLTAAAGGPNVGESSFTAKE

SEQ ID NO: 167022 - protein, 159 aa, Heterodera glycines
KAMREYNASNDEMVLFSYSIGFAYILVGLCLSGQIGEAFLFFAQRPLQTYGYSVLIGIVGYFGVNVVLTMVRTSGALVTVTVTTMRKAVTIVFSFYFFAKPFTLGYLWGGLVVLLAIYLNVYTKNKKQFDAKLAEWWSNLAESNNGQKFAAERKLLLPV

SEQ ID NO: 167023 - protein, 94 aa, Heterodera glycines
ICFRLSGSRTCNSFDPLMAVACGAALASLVFTLKSNPDEIALRARLAQLRQQMVLIPASIHSTRADERLEQYTVLLNGNRLELVDFLLFSVLVE

SEQ ID NO: 167024 - protein, 71 aa, Heterodera glycines
SLSSSSSTSSVALSSSSSSSSSSSSSCSILAKSSSSSSGTCSSRDGIKVVEDGTISKFSAESFLELAHELL

SEQ ID NO: 167025 - protein, 190 aa, Heterodera glycines
  unsure (1)..(190): unsure at all Xaa locations
MGNSQSGLPGFPPGQGGKKKPDDKEKKKWEPPXVATRVGKKKKKKGPDSINKLPPVFPTTRCRLKLLKLERIKDYLNIEEEFITNQEALKPVQEKEKLQAQLESGETAEPDERSKVDDLRGSPMAVGTLDEIIDDDHAIVSSTSGPEYYVSILSFVDKDLLEPGCTVLTHHKNNSIVXVLGDDADPTVSL

SEQ ID NO: 167026 - protein, 129 aa, Heterodera glycines
AVKSDSLARFLQLELCSALSTIFSRIHFPFEEPVDLNSLHFPLHQSAQIIKCLQLVTSETVATTSRSFYYQPKWPIELVLDEFRKRFDYHFYGDRPTNNATKPEWFFTQLSYCAENHIEYFEQHIQPIA

SEQ ID NO: 167027 - protein, 185 aa, Heterodera glycines
MVKFAPTVKLNNGQAFPVIGLGTWKSKPGEVEQAVKDAIDAGYRHIDGAFIYGNEVEVGNGIRAKIAEGVIKREDIFVTSKLWNTFHRPDLVVGAVKKSLQNFGLDYLDLYLIHWPVGYQEEGELFPRGADGKVFWSDVDYVDTWKELEKCVQLRLLKGIGLSNFNSEQVTRVLDRCHIKPGVNQ

SEQ ID NO: 167028 - protein, 164 aa, Heterodera glycines
EEELMSRLNLEEKNRALSHELREFGQRHHALQVRSDFEQQAAAREITVLRKAVGDVHDIQDQNDSLLHQNDSLLKTNEKLNKEIVMLKKWLRVLFWLLAVLLPPIAVFIRGIMSGLRCSAIGLRCIKCCLLCFCGWFPGIWYALNIVREQETNESNFSNHFFLT

SEQ ID NO: 167029 - protein, 154 aa, Heterodera glycines
GIGEASYAVIAPTIIADLFVGQMRSRILMFFYFAIPVGSGLGYVIGSSATSLAKSALGSVDCPFCWQWGIRVTPLLGFFCIITLLLFVKEPVRGQSEQSVAQLMPTNYETGTISPSSRRTVASAEAPNENIWKEYYHRIRTHTKSYCADIGHLI

SEQ ID NO: 167030 - protein, 103 aa, Heterodera glycines
  unsure (1)..(103): unsure at all Xaa locations
WCDGLKQVDPRLYYALMITVIGSTFPLINVSMNTIFSAAVGPRLQAKQQSILMVSGGMGQMQDPLLIGHLVTFYRPKIIWILEXEPNTFTGTMWVVFYKRLVP

SEQ ID NO: 167031 - protein, 41 aa, Heterodera glycines
QTASNGFVGAQATWTYRKTPARIDPVGVLLGHPRCCCCCFC

SEQ ID NO: 167032 - protein, 166 aa, Heterodera glycines
GITLTMLHSIGHKEEDLNAFGTSVWPLLVAMNASDGIGKMHFEFPITFQLLRRSIGPFFAKHGACFPNLRMISFDFGILFEIPPAVDASALSSSSDDNDDGQVLCKWLHTPRADGQPKVLKMNFDYNFPIEKLKTLFLSATIAVSFIIWFHFFEHDADSNGDQFEL

SEQ ID NO: 167033 - protein, 31 aa, Heterodera glycines; identical to SEQ ID NO: 131563

SEQ ID NO: 167034 - protein, 70 aa, Heterodera glycines
NLPTISIELTPLTPSTLGSLIAMYDYKIFVQRVLWGINSFYQWGVELGNHLASIILDDLQGGPIHEDDSG

SEQ ID NO: 167035 - protein, 180 aa, Heterodera glycines
MMSSSSADPSTVPAIPPVDDDSLTEHEREERDRQARLKEEAEQAALPYKWRQTLQDVTVTIDLPKGTKARDLTVVMEKKKLKAGLKGKEPIMVGELHSAIKLDDSTWVIESGELIIQLEKVNKMEWWKNVLTHHPAIDTTKIQPENSRLDELDGETRGLVEKMMYDQRQKGMGKPPSDEQ

SEQ ID NO: 167036 - protein, 166 aa, Heterodera glycines
LVEENLESTSNANSLIEPIIASPNAQGTVPLPFQFFESFSTFSWREIGISPWLIKQLNEFNLRRPTPVQANCIPKILEGSDVLGCAKTGTGKTLAFALPILQQLAVDPYGIFALILTPTRELALQIGDQFSAFGRQLKLQCSVIIGGRHQMAQAQELSRRPHIVIA

SEQ ID NO: 167037 - protein, 159 aa, Heterodera glycines
LHQNGHVRSNNQTKTGGPKNVPAKHCQGHSPSPKCFRANDKSLLNRFIFARFACDDPSVIPPFFASSQFGIDRAGGPIVLPDQVGLLIARLHGVVSTAVDVDVSIPFEPKGGKAHHQRFLHEADLSQLNEALERLRQFVEMDPNWMEQRFISSKEEGEE

SEQ ID NO: 167038 - protein, 175 aa, Heterodera glycines
  unsure (1)..(175): unsure at all Xaa locations
VLVGDDFVVVAIDARLTGDAEIEILSRWRQNTRILSHKIIMTSCGFYGDVLQLRCILKLPIDLFQLIYQMPMSLDQCGDMFSRTLYSRRFFPYFTGTIICGITSDGRGDLYSYDPVGCIETQLFEASGNGGSTLSTFFQNQWAYSTVAPXERKNMPKPTLERALSVIPDAFPGLS

SEQ ID NO: 167039 - protein, 64 aa, Heterodera glycines; identical to SEQ ID NO: 139860

SEQ ID NO: 167040 - protein, 132 aa, Heterodera glycines
NPAIDLLLAGRQHLRGGRFIRDLIDIGKFAFDTGCKLFHTAICDLGKKRKREAVYGKNEPAPNPAAVNEFKVLQSTPIDELVEKVKKQLREVAEKPGFKDLSPVDQEDTLLDAISADDQFMKDLVRESIDDS

SEQ ID NO: 167041 - protein, 46 aa, Heterodera glycines
QETHIVLLIASVCSLLDIIATAVTLPSLYSEMSQMNSKVHYGVEAF

SEQ ID NO: 167042 - protein, 102 aa, Heterodera glycines
LLTIVSIYWFNGNILSSQRYYKEHFASDSNTEKLYRKYVAVPTAYAAFPYDLGGVLPREMVSRQYNLTQMTLFEDGGHFAAFECPKELGEDIIRFAQGLSLD

SEQ ID NO: 167043 - protein, 76 aa, Heterodera glycines
MNTFVTGTGILRLIGCGVFPLRCLCCCCCCVVCALSCEVTKLFSPLFGIGSSHKLTSANFPSFSLSHISVLFGFNR

SEQ ID NO: 167044 - protein, 144 aa, Heterodera glycines
MVSAQTYSYFVAFAAALGGFLFGYEIGIINSVLEMNPFRLYFGMSTVVDGALAKTAEATFYTSSIVTAFVFGCIPGALIITLGGDILGRKRAIFIGAFLFTLGGLLQALVPAGSSIGSRVTFISAGRFFGGVGIGMLSGSVPLY

SEQ ID NO: 167045 - protein, 91 aa, Heterodera glycines
EEEDPTMVAAKYGLGERNDDEAVEEEPLNSGDDQSDDEDLDTLFDAENVVVCQFEKVHRARNKWRFTLKDGVMHIRGKDYCFQKCTGEAEW

SEQ ID NO: 167046 - protein, 177 aa, Heterodera glycines
MRPMDYLEAEPSPSLSNGTLPSSSSSVASRLYLNGRLNSRRNSFSSEPELMQFNDHDSISTDFGNATNQMSILAQKLTELQEEKMMISEEKSRLRTDNAVLQERVHLLEEHLHATEQRWAEKCEEEKAKSRELAHRMERERQLEAEREALKHQMLSKEVKQLEVEKERMGGEMRKAR

SEQ ID NO: 167047 - protein, 97 aa, Heterodera glycines
MSKGNKNVKAVAVLGLDDTDTDATIDLEYHDRLVEASKDFKSENQYKELLRLRFKLVATGVLKLERSLDGLQIPPPILEKIGELFDCLDWALSADDE

SEQ ID NO: 167048 - protein, 171 aa, Heterodera glycines
MIFRQFLRRFLVANHRFVPLESFWVGRLNSVLHSTVCGVGPSNFSTGFANHLVQHRFFSSQSDGLNVFELGSEDDFDNRVLQAQQPVMVQFYADWCGPCQNLAPRIEAKVNGQNGEVLLARINVDSSLGFLTAQFDVTSVPTVVCFHNGEGIHRFEGDVDDSYLDEIIAHL

SEQ ID NO: 167049 - protein, 45 aa, Heterodera glycines
IRDLILNDEDTGIFNLIHTIYTSTALPFLTFSLLIRIICYARDLP

SEQ ID NO: 167050 - protein, 188 aa, Heterodera glycines
MSPSADNSSDDEQIACDPEITFRGRSVRPLKWLSEVSSCRYLPEGEMVTVCQILISRLAYMPNTVSVQSPATICGDIHGQFYDLMKLFQIGGDILETNYVFLGDYVDRGYYSLETISYLMLLLLKYPDRITLLRGNHETRRVSHQYGFYDECQQKYGNSVVWSWCCRVFDVLAIAAVVDNQIFCVHGG

SEQ ID NO: 167051 - protein, 98 aa, Heterodera glycines
GAGSELETSKPSTGASLAEKRLCFSKQFGLPHLLRMFVRFTDMLAYTEWSERSLEAIIRHAQDFVMFLSKNHADFYDVEKDYMLAPAEYHKRVWGNHS

SEQ ID NO: 167052 - protein, 165 aa, Heterodera glycines
MLFSPTFLRFVNLTNLPTTSSLKCHQILRHFLALKSTTTIASASKVPPLDVLDSIDIESLRRCQLEFNSGAGGTEASLFTAELFNMYAKFAARNGWKWTPHEVSKCNKTNSVGINSAIVLVEGDWCYAKMRFESGVHRVQRVPVTESKGRMHTSTASLAVLPEPE

SEQ ID NO: 167053 - protein, 168 aa, Heterodera glycines
NLQGQRSYVVVENVQSDEEHEANSLNCTLKVSGFLRGAPLSVNKLVHLPGWGDFQLARIDRTLEPCPMKTPNDKNPPTGDVKFAVLAKADPAKRTPLDSEIVPDPMEAEQTWPNENEIEENKFVVPKVSRKVPKGTSEYQASWLIDSDGTDENDEDQSEEADEEERED

SEQ ID NO: 167054 - protein, 66 aa, Heterodera glycines
KMIIKYVLFIHSLMRPSVDCAATVVADPSCPPPHPPLLVRHLWENSVLCSCELLSLCRPHSRQSHT

SEQ ID NO: 167055 - protein, 169 aa, Heterodera glycines
VLIAIYVPFCRFSIQSKCRFGVPDVLYLSMALIALYPTWHWTQLHGGLSNDHVRQWLPCLFALFALLGFAFAFYVSQIPERILPGKFDVIGCSHQWWHLLILAALTYSHWTGIQLLITYHRTALIRQQPLHTDQMLLQSAASPFVPALSSSGRLGTNLLNHTATSTNGG

SEQ ID NO: 167056 - protein, 44 aa, Heterodera glycines
LDLRIASECSLMAIIATVITLPSLYSEMSQMNIKVRDRADAFHV

SEQ ID NO: 167057 - protein, 171 aa, Heterodera glycines
EHIGEYLPQLVPDKNMARLRREHRVGAIVRQRQRLFFRLPPFFRTGKSLESRLALLLRSAAVGHFGECQPGKSGDRCAVNERLDPFEVGQPSAGDHSKFCADGHYRIGLKSELTFVKNLDVLVEELSLSKGRLGAKGSKLTDETTEDDGGLIGLRNGGKIRLLENVHGLNN

SEQ ID NO: 167058 - protein, 182 aa, Heterodera glycines
MISCRRSVSKCLLPQITNRLTSNFGHLQPCCSSQKVPMCASASNRSSVRLSAIFPRMLSSSVGDKSHERPQMYQLEHIQKRLEYTVPLMFNARLDYTFYTKDVFVDNQILGSQLRSLEGFMHHISLITVAAQFCCTHIETQILNISPILEDGTVRLRWRICYLGLLSMLNFRNFNRQYRLKN

SEQ ID NO: 167059 - protein, 166 aa, Heterodera glycines
KRKVSGVFFKEVPAIMAFPANKLLVWQQNDIAQTSCSSKPNTDHFLQFALEVSPINGNKTKRVFYLKRPYDDPFSGFKSRLRHKISEFLGVQDELAVQPIYSGDQSPAEAIEDVSLFDLFFNATDPCSLSALRIGTTDYEIVRDSAWLDNVEISLLPLVGCPVLPS

SEQ ID NO: 167060 - protein, 83 aa, Heterodera glycines
FFFFFFFFFRAAFISIKLFFNYSIRSHLKQILLGNGRSGNGNGTHLSSICTDSFGSGPLSLRISIVLQIVNSLLPSKCLSPTH

SEQ ID NO: 167061 - protein, 210 aa, Heterodera glycines
LDPTVVNRIAAGEVIHRPSHALKELLENCLDANASAITITLKDGGLTLLEIADNGHGIHPHDLPIVCLRFTTSKLRSFDDLRTVATFGFRGEALASLSHVARVAIVSRTADSDCAYASEYIDGKPLNDAITPCAHPTVGTTISIHDLFYNLQARRRAMRSYNEEHANVVDTLVRYAVHYPSVAMTLRKHGAGVPDVSTSGGSTTDRIDVI

SEQ ID NO: 167062 - protein, 150 aa, Heterodera glycines
AVLSNLSLCCSSSLLQIQRHFVTASILRKCPSSTKQFANAHRCISRTRTLFMFIHDNEMEQWAEKMIDHKLKENGLDSADVCFSDLVHWWYSNVYESTLNVHGLRLLVKIALDKEQSRQFVRKRSAIAELWDYVKDTMPASDFLPFLVMG

SEQ ID NO: 167063 - protein, 119 aa, Heterodera glycines
NNPVNINQSMHFCAGGKLTNCLWVLKALPRFVAELTRHPIVHWRLMRTPNAHLSTVRASGRVDVAHVHGQPINVHKVIRDYVQTLGSLHNVGTTCFCAERANDWGEKGEDGQSFGHWNI

SEQ ID NO: 167064 - protein, 34 aa, Heterodera glycines
AFANCFFKNLICLFFCNVDKFGLLLKKKKKKKKK

SEQ ID NO: 167065 - protein, 62 aa, Heterodera glycines
ANFVTGSTQIAKNFSRRRLSAPPDLHFPLFLQVFCLKTAKIWSFLVKKCSCYPAVEKKLLVK

SEQ ID NO: 167066 - protein, 44 aa, Heterodera glycines
IKIFSIKIQPMEQQQEQQNQSANDHDHYVTVRCFLDSLICNLFF

SEQ ID NO: 167067 - protein, 94 aa, Heterodera glycines
DELLELLPALLSMDLVDRACRLQNEMLTFLEFVAEVHAQLWPSHLEAFHLTGPLALHFDSNSCEPMPRKIHLTDELMPPKLRSKGTEWKLEIVK

SEQ ID NO: 167068 - protein, 177 aa, Heterodera glycines
MDIGKKQPKEMKNGNLLTTVYPKDVPFSWISRPTFDVAAMPQILANPQNRLTAAAFADIVRSIQRDSRFVSYALFYSRMVPVWLVFSIVILLAVLASSPMGGLPVMVFAFVWLFMLVLGLLFCALLQKFIVLALRVLVKEINAISQTFRLLVGIQNRGIVFIFYDFDGCREDIARQI

SEQ ID NO: 167069 - protein, 119 aa, Heterodera glycines
  unsure (1)..(119): unsure at all Xaa locations
PPPTSTTGPKSPTPSRARSSLSAARSSLPTTRRPRATMLSNGLSTASSRTATTTSSSSRSLSSRNPXSGSTSTRARTRSAPKSKSATKPSKPSTRPLPPCSASATSPAKALSSKVMPAT

SEQ ID NO: 167070 - protein, 84 aa, Heterodera glycines
INFITNIHPFTILALLIMIIDHIGQSVCHFLSCHWPVICICCPFNFPILHSVKRHTSPLKTFAKCCWGQKGKDEQKEKEKSHFK

SEQ ID NO: 167071 - protein, 58 aa, Heterodera glycines
IFYRFLNVWIFFWLTKTSSNLVLSILFQIAPNFFYSLTRPKQTYFQKISHEISFLNFL

SEQ ID NO: 167072 - protein, 159 aa, Heterodera glycines
HEGDIGRSPRMGYHAYSLARQGAYVNLVGYMDNQPHGDVFGEQINFVALPKPPISSSSDNPFRRFLIRLVKMVWLLFAIPYAFFVLCRGHRHRQLIMVQNPPGIPAMIVCYLLAKIRFATFVVDWHNYSSSMLDNSWISYLVGLIEGFFGRRASFNFCV

SEQ ID NO: 167073 - protein, 96 aa, Heterodera glycines
  unsure (1)..(96): unsure at all Xaa locations
KVIEIRRTRRIIQRLTARLRXRNFKAIQKARDVRKRAIAAKEARGEPTPPEPAAVPPPVYRQSPPTGNSPPPTYEDSLLHQFFMECVSVNENGPTI

SEQ ID NO: 167074 - protein, 147 aa, Heterodera glycines
PSPPFAHSLTMLYPSVLSPSSFAMFVYLFLFFSCSCSISLSAIYPPQNGISEEKRGFSLVRNPYSWMARLQQNLSVPVGLDDVSSKNDEQLLTNLLLEEPLSKRSFPAAPRRPQNPYSWMSFADADQSNMDWLITRLRPFSDLVSKR

SEQ ID NO: 167075 - protein, 173 aa, Heterodera glycines
MADLDQNNARNESEGRSESTNEIRAPITEAEIRAKEVVMPDDVLGLNCITENFLCRPEDNVYDIEFVRFKVRDIDSETVLFEINKPDAAANDDCSEAGGNSDEAEEEGNAEEGDKPFTPRFIRYYFKPSFLRLRHIGATMEFVVGNKPINNFRMIERHYFRDRLLKSFDFDFG

SEQ ID NO: 167076 - protein, 175 aa, Heterodera glycines
ICGDAVGTEIQMGDQMAMVPTQSTPMEQPNCHQQHDDVPKNGEHLTMNREFYRPTTPSSTSVPKKRTFAEISGFDSLTDSAHATAKVSRIALISYPAAPPAVLKSYTDDRRYTMCHLQQNERQNPLEIEAQNCLLDLRQELAFVDSLDPSLGQCLTNSRRLLISESMKLEEWHNP

SEQ ID NO: 167077 - protein, 39 aa, Heterodera glycines
DQSIRRIRHLKKHRRNIGRHFFFIHKIEHRLRFVPSAEF

SEQ ID NO: 167078 - protein, 54 aa, Heterodera glycines
PLWPLPPLCSLSSPCSFFLSISSFHSPFFSRNSIPPQSFSFSIALKFSKRQNSR

SEQ ID NO: 167079 - protein, 66 aa, Heterodera glycines; identical to SEQ ID NO: 155643

SEQ ID NO: 167080 - protein, 36 aa, Heterodera glycines
FLFFFLLILLSVVFFVMTEHYLVDISQERLSPNKFF

SEQ ID NO: 167081 - protein, 149 aa, Heterodera glycines
MFCSNSLFCFCFFLFFSIHCAFGVKFRINGTLKCRYREGMEKPYRNEAVIQLWEADANLFGFIDKDDLLGETKSSKGDGVFELKETKDEWEMGELEPYLLIRHICWGESPPGENCALLSRMDLQPTPAAKMLPPIILGMDSQLKTIVMC

SEQ ID NO: 167082 - protein, 113 aa, Heterodera glycines
  unsure (1)..(113): unsure at all Xaa locations
MDSSQKQMPTLIPFTCPSKDSSPPKPKWTDNCPPDEHSQFAPSKAQCALPKNVSHPNTFPPLPLILSPIGGHFRCCCXCCCLEFGLTSRNFLFSSDGGRENSLGRGFEAGRFQ

SEQ ID NO: 167083 - protein, 170 aa, Heterodera glycines
MLGNLELAELKTVSTLGVGGFGRVNLVKHIDTERVYALKVLNKRHVKEMNQVEHVLNERSILLSCHCDFIVRLHKTFRDSERLYMLMEYCPGGEVWTMLRNWGRFDEATARFYCAAALEAFDYLHRRMIIYRDLKPENMLLDIDGNPKLVDFGFAKKLPTEGSRAWTFCG

SEQ ID NO: 167084 - protein, 203 aa, Heterodera glycines
MDKFPQLSRVPAPPGVNSDQAAISLMAMAEIFRTANKYKMAIKCVMTSLRVPCSSELFALCSFELGKLLWLYTNNLELAQFHLCQAHKLMRQLGPGLEQPRLKTATLLAEVFLARRLFSDCVQLLRSELPDSQKCHSVHTKMLFLFAEAYLRLGDFNGALDIVRAGVQFSRGPGWGGVIAECYFRLVKSLVLSIQMTDQHELG

SEQ ID NO: 167085 - protein, 206 aa, Heterodera glycines
ICHVYIDRKCDEKMAIDIVRDSKCDYPAACNAAETILIHRDHLSTPFFESLCGMLKAEGVKLHAGPKLQSLLKFGPPAADSLKYEYGRLECTLEMVDNVAEAVKHVIRYGSGHTDCIVTSDDAAAEQFLARVDSACVFRNASTRFADGYRFGLGAEVGISTGRIHARRPVGMEGLLTTKWLLRGAGHTAQQFKVGGPLIYLHEPLN

SEQ ID NO: 167086 - protein, 105 aa, Heterodera glycines
MAGRAVASLSRFSVVYVTVPSAEIGKRIAHELVRSRLAACVNIVPQITSFFFWKGKEEEDSESLLIITTGRERLEQLREAVITLHPYEVAECAAFPIEYGSPPVL

SEQ ID NO: 167087 - protein, 198 aa, Heterodera glycines
MSLSNVHTNLVQNGKETNDPFAFSAADHPQNVGNNESSSSIEQKRHFRKRVGQLELELADSQQMCEAVKHENKLLRMELNHQKLLTEHYALQAKVAAMEKGPRKGREMELLHDQVAHLKEEQEKIYVKSSELEQFKATTGQVDELRKDQKNLLERISTESEQQQNNFETLKGKLYGKIAETDRNVEELKKQFGNVSQC

SEQ ID NO: 167088 - protein, 188 aa, Heterodera glycines
MKRKRSNTSRNLQVQSNGVPTKIPSEQTAIAAAAKQFKTDQSNLRLSDLGGCEAQFLEAIQLMTHLKHPKLCEQIGFTPPKGLLLHGPPGCGKSAFAMALAGELQLPILSVSSTELVAGVSGESERKIRTLFAEAKMAAPALLLIDDIDVIAAKRENAQREMERRIVTQLIASIDGLKSENDNESCTV

SEQ ID NO: 167089 - protein, 70 aa, Heterodera glycines
GACAQTCLLIEISKEHFPEGYVPTGLSTIIAEYIQEYVKRVELALGDTAGHEDYHRLLPLLFPDTEPSQM

SEQ ID NO: 167090 - protein, 176 aa, Heterodera glycines
MSVRRINKILFRFLKELILPPRIQALTKIYPAQKVSSYLPKAAKPGKSPMRKILTGSFRALRNRNQLLRPFVSLHSYHIRLKELERARGFLSVRVSEKRDVLERVKHLFGTNVRYNRSLAVTELPDHLDGYEIGAFIAKGCNGAVHELKLRVADGHSRRIAPMTSQKEFPLALKIM

SEQ ID NO: 167091 - protein, 204 aa, Heterodera glycines
MIRGFFKQYDKNLVAKFNSLKNKAWRVAMPGSNIRKLDTKSISGWSIVVDIAFNALMKGQVVAVPTDTLYGLVALAEHSDKLYKIKRRSVQKPLGLFLDRPESIKKYCDQTVPDEFLHLIYPGPVTLLFNRTDAVPSDFNPGCSTVGVRVPQAKFVRDLCRRMPFRLLAQTSANVSGGPNPLCIRDFEEIWDDIDLIVDAGEII

SEQ ID NO: 167092 - protein, 126 aa, Heterodera glycines
  unsure (1)..(126): unsure at all Xaa locations
XXXXXXXQIYVFIQSFVVFQESHKNSLISAIFIKCFAIYFLSIFDCSFAFFYFSTFSAFFAIQFRFRPSHQKCQPTIGFTACCCCTALIWSLAINSAEGSNDDTIKSSRSANCSICYVMVDNIIVK

SEQ ID NO: 167093 - protein, 162 aa, Heterodera glycines
  unsure (1)..(162): unsure at all Xaa locations
EVEVSEKKDRVTDPLCLTRAAVEEGIVPWGGDALLDALYNLDSLKPDNDDHQSVIGILQNAIHQPISTIIANARLEPSAIVEKALANAETNYRYDAMNDQFVNMLEAGIIYPDKRRARRRCTTRPALVSLMATTECVVTEIPKEXPTMPSGGGMGGMGGGMG

SEQ ID NO: 167094 - protein, 188 aa, Heterodera glycines
NALQAAMEGYQVSTLDEVADIAQLVVTTTGCKNIVRGEHIERLPEDAIVCNVGHFDCEINVTYMNENCVSMEQVKPQVDRYLMRSGRHVILLAEGRLVNLGCATGHSSFVMSASFTNQVIAQLELYTKYGTPDAYKTGLYLLPKQLDEEVARLHLDKLGAKLTKLSKDQAEYLGIPQEGPFKPGHYRY

SEQ ID NO: 167095 - protein, 98 aa, Heterodera glycines
QAEIMRAGPVTAAFRVYEDFGHYASGVYQHVAGKYRGGHAVRVIGWGYDTDSKLPYWLVANSWNTAWGDGGFFKIRMGTDECGFETSGICFADPDQSN

SEQ ID NO: 167096 - protein, 95 aa, Heterodera glycines
EMGNEKWVRLLAQKPPLFAFPDISFGSQIQHDGIDSFLLFIAKNEDDEQAKLCLELPLYPETSDDLALGRFWLIQLSRAHFRWMDFGSLLLSTLI

SEQ ID NO: 167097 - protein, 54 aa, Heterodera glycines; identical to SEQ ID NO: 126699

SEQ ID NO: 167098 - protein, 178 aa, Heterodera glycines
CSLTCAKGFSCEEGWSKIGINCFKVFTFYGSYGAENFANSKEAKSRCEALGANLASLHSSFENQFVQELVRKSYTQCQKDNVPWCCDSYTYDGYWIGMSLTRASNGTILSAKWSDGTNTHYGNPLKFADRTPWYTPEHRPKQDSPESNCVFMLLTNSGIGWADYDCAMAKIGGYVCKK

SEQ ID NO: 167099 - protein, 89 aa, Heterodera glycines
RETHLVLGIASVCSVLVMIATVVTLPSLYSDMSPMNSNVRDGVDGFRGNTDSAWTDLMDVQVVVTPPMKPRDNPLHSIFCAIRGLPGRC

SEQ ID NO: 167100 - protein, 155 aa, Heterodera glycines
  unsure (1)..(155): unsure at all Xaa locations
MGKRTSGNVGRRRKKNSEKKGRWRRSGWEAEEERRKFFSDEFYGAFPHLRGTESVNAERWRTRRKPFEEECSSHLDRFDRNWRDDPFWRDLYPRWAETIFTDGIDVXTNIINDSNRFAVEMDTYQFRPVELRVNTMGDTLLIEGRAEDVRDREHY

SEQ ID NO: 167101 - protein, 94 aa, Heterodera glycines
DIRIKDVEKWDKTYKPEFFYGKAPDMEVDRKALARTTSILHYHDEKLDLAGKDEWQEANANEIIDFLKDATTDLLPDVMVRMGRPEGHLDEMLG

SEQ ID NO: 167102 - protein, 44 aa, Heterodera glycines
IFKFNFRRNHKTLPLPHNILFCNWKIYFLKYHKKTIRKKKKKKK

SEQ ID NO: 167103 - protein, 176 aa, Heterodera glycines
LDPNSQMPTETTESNEKKENPEDISSTVFFEHQQELLNETVSSGDEDFRCVSVTSNESEIQEPRLSTPTSQLPTETSDSSGKKENPEDISSTVFFEHQQELLNESVSSGDEDFRCASVTPPESEVQEARLLTPTSQMPTETSNSNGKKENPEDISSTVFFEHQKELLNESVSSGDE

SEQ ID NO: 167104 - protein, 177 aa, Heterodera glycines
MSSPSPVQRASSPSSAPRTVVLAMDDSTHAWHALEYCLANVVSPARNDRLFIVTVALLSDTWLESIATALRADPGTMGVPFVPSAHSASADRELTDHTQEQLKLALDKANMLLSRAKLAVRANPDTRNMHVETVALHDTDARQVLTDYVNHMSPKADVLVVGSRGLGAIKRAMVGST

SEQ ID NO: 167105 - protein, 84 aa, Heterodera glycines
VFDINPNNPVRGISRFYRTIEHNVFSPKIHKSEVTVLVGNWLANRQFAPAITENCIHTANSFCVQRLYRCHQLCKGHRALVDDK

SEQ ID NO: 167106 - protein, 125 aa, Heterodera glycines
MAQLPLFNDFSKGNSRANSCVGFAPVSGAHEEALKTRRTVVKMLVACVSVYFICYSPIQAIFLCRGLFNLSIHPPYEFVLLMNAMAILCSACNPLLYTLFSSRFRARIGHLLCLCCDIFYRRHNK

SEQ ID NO: 167107 - protein, 92 aa, Heterodera glycines
RLWLLAPTRPQPTDWDNYNWCCTFPYFGSWKPSCCPFAIPTGAVIAVIIACIILVAVLVGLSCWCCYFCPLYKHLYENDDEEAEEEQRQREG

SEQ ID NO: 167108 - protein, 209 aa, Heterodera glycines
  unsure (1)..(209): unsure at all Xaa locations
VLGIASVCSLLPIKGAVVTLPSLYSEMSQMNSKVRDGIEGFPRQHDSGWTELVDLPMGXTPPPNPLDTPLTPSFRAKVLLPGHWPCAXSQQPNWPPGPPRPSRTPWETPNNPGGQXKPGKPGKPGQNASSLCAPENSPGAPCPGWAPPAAPEGKGTPRATKGAPGKPGNPPLQGGGTWKTLGAPGPPGKTWGNPEAPRKPCATPGKPGR

SEQ ID NO: 167109 - protein, 134 aa, Heterodera glycines
LQLSFLLFIFRCAHCFDVSLQLCIFLGVVRQRSVANAFVVHGHFDANAMEWHAERLFGTSLFQHLQIVRPIVGHAEIVGEQMCQFLIRFYATVARGGAGVVGLLSLRLCRCARAHQVVQHKLECRKKVALPANG

SEQ ID NO: 167110 - protein, 51 aa, Heterodera glycines; identical to SEQ ID NO: 138508

SEQ ID NO: 167111 - protein, 166 aa, Heterodera glycines
MKDSAIQQLTDPEIESALQRSKQLAASNGGQKRTFSDDLNFYPAKRKSNGTDMANVGMGAQVAETLVENVDIPESAVGLVIGRGGEQIQLIQQQSSCRVQMSSESNVSGFRQCTLQGARHNIDKAKQLIQEVLERSNRSAPGPQNGANAITIELSIPGPKCGLIIG

SEQ ID NO: 167112 - protein, 116 aa, Heterodera glycines
IEPDVGCRLHLSGLNWEWHTLDTLRSHFGQFGTIEQLEMVAYPRGCGSLVFDSLNAAQLCLAAGEKHSVNGHSIEVKMVPAGFSPLFSPARPNSSDSALSAASSAPPPPNAPLNLI

SEQ ID NO: 167113 - protein, 89 aa, Heterodera glycines
  unsure (1)..(89): unsure at all Xaa locations
ISTVPFGEPPSAFVLLCQTLLGARFVQTAHFCRTCAVPSAKKRCKDYXYCSVECQRFDWGVHKKCCEAIKQRNFDQNCTATNFEELNIS

SEQ ID NO: 167114 - protein, 28 aa, Heterodera glycines
FFFCFFLCTQPIVRRFRKRERFFGADLG

SEQ ID NO: 167115 - protein, 119 aa, Heterodera glycines
TNNERTRVSRWQDINPAPALSDIKNNNNHNNNNKSNNLNPNVFPPAPLLRSTAALPSLLNVTPTQSACLLPSSNLQSLLGEVPSLLKNRGHQVFAVPPNIPPLRLFDVHEQKQPLPNGF

SEQ ID NO: 167116 - protein, 153 aa, Heterodera glycines
ESSFSWKDWVRLRDTWNAVVTSQSQIHRHSEQLDKIVSEESSYRNYASDIQNRQIMIQIVERNVNKARELVRTALYQLNAFNSALSQMSAMFKSQEENDSQTEHGILELNNQNAEMRLELSRLRNELVFRRRHMLKSLYEVFFLPKLKRSSIA

SEQ ID NO: 167117 - protein, 85 aa, Heterodera glycines
  unsure (1)..(85): unsure at all Xaa locations
MKAEHDPIARFPWRALYLSKGLVINGGVVAIFYRILALFTIHPMSMVATLLQLAAGFLTIALEAPFCCAFVDFIXRIAQFSESRA

SEQ ID NO: 167118 - protein, 140 aa, Heterodera glycines
KLEPSFLFELCVESVLPTKNQQQILSSLSLRQLCLLSCLVKLESSEYKQRIDFTYQEIAKGYIKFTNDYEKSMRVCSFVLYRDLDELAASGALSLAKGSDFGQIQFKKATSNVELDAIIKTIGRGKIPTKVENWILSPEL

SEQ ID NO: 167119 - protein, 211 aa, Heterodera glycines
HCSTHALHCPAATMNSLRTGLPKLARGFASAAVQVPIQMHSLEGRYATALFTAASKANSLTAVETDLRTFNSSLRSDAEFRAFIESPVVDTKYKTQAVKAVAAKKNFSATTTNFFTLLAENGRLDMSVAVLESFGQLMSAHRGEIPVVVTSSQPLGPKTLNRVRDALAKGGKFTAKNQTLIVSNKVNPSILGGMIVEVGDQTIDMAVFAKM

SEQ ID NO: 167120 - protein, 164 aa, Heterodera glycines
VFGRHLRTEANPSPALYRMTIFSPNETVAKSRYWYFLRGLKKVKKATGEIVSIKVLHDKHPLKVKNFGIWIRYDSRSGTHNMYKEYRELSRTDAVDSLYSDMAARHRARFRSIHILRVVELEKTEDVKRPYIRQLTQKGLSFPLPHRITKENTQKVFSAKRPST

SEQ ID NO: 167121 - protein, 153 aa, Heterodera glycines
EVVVQLAHSLSVFQNETDQIFKKAALWMEKRTRRMKQLDKRMEILERKMEAVEKLPEVPLLNCASNFPEFGTPGGIVVPIFGHSAPFNRRSGVHFMEQKWKKDFNSNLLNEANVRRKDFLAQLFVKEKQRKEKVILDVETLEKLSPSSDNGDS

SEQ ID NO: 167122 - protein, 98 aa, Heterodera glycines
RGARKTKAFTIPFISTANRIAASQRYIRSLQLAETPRIAFDCRFLTLHTKRGLNLTMLQLQMLLFVYRDRQMPWPIHLCNFPSTSSADDCTGGAEAGA

SEQ ID NO: 167123 - protein, 86 aa, Heterodera glycines
KDAKIKNRNGGRKNCPAALTPSDQFVLPPLISRFLPSLPLRSFRRPEVLRFRPNRRRRRSVARNSTIGRSSPSPIRSSPRSQSPTA

SEQ ID NO: 167124 - protein, 132 aa, Heterodera glycines
FQQNVRITEAALNLCQEGVAIAQAQAVHRTTAKRLNVIDGAKASGGTALGSQHVQLMDGIFGIFAQTRLVHVRELAMEIKPFPVPRHTFRQKVAWAISQPSFLGLTLVFKAPFWPFSANSSAKTSSEKQRKK

SEQ ID NO: 167125 - protein, 47 aa, Heterodera glycines
  unsure (1)..(47): unsure at all Xaa locations
KNRMLKCSEQKENIFHRIVSATCCSSXPVIFHKCRMRWLEHLFVLQT

SEQ ID NO: 167126 - protein, 39 aa, Heterodera glycines
SKSFRLEVLSGSFFAATICTQYSRAQRKKRTRRLSTAHS

SEQ ID NO: 167127 - protein, 166 aa, Heterodera glycines
  unsure (1)..(166): unsure at all Xaa locations
FVLLHNQRNSQSQSKKLFIGGLGRVNDDALRQYYSQWGHVIDCIVIRDPATRSSRGFGFVTYATTEMADVAMAHRPHEINGKAVDAKRAVPRERMNLILDNDPIPFFMNIEPDVGCRLHLSGLDXRMAHIGHFAFSFWPFGTIEQLEMXGLPRGWGSLCLIHLMLP

SEQ ID NO: 167128 - protein, 157 aa, Heterodera glycines
LFICTANVTDSPQRGLKDRMEMIEVAGYVAEEKLEIARKYLVPKCREKCALPDEKLVIKDDAIDSLIKSYCRESGVRFLFIAIEKICRKSAYQLVRGEGAGTQVLPIGVENSDHKKNAGGEEVTSDRLHPTTPVGGSMGTGWTETGRSALVARRPLQ

SEQ ID NO: 167129 - protein, 185 aa, Heterodera glycines
QKHRRMAKKMYEKARDRAERGRVLLSNERGIDTKERSSIILMPIDQPKVLTAETFASGRSRRVKGEAQANGGAHTERKPINGPSAAKRPANLQIATDKHADANANASQNTVVYGPIFPADYWQLPPALLAARLRRFSKADIMRSLRQNARRMGVDGGKLRAVMRHIEIMRREEAQLRNQRHYQLP

SEQ ID NO: 167130 - protein, 82 aa, Heterodera glycines
NSLKKVEPKTVLFILGSDTVPTPHTITNAYSAREWFLHEAVDTAQVAPHFVALSTNGLSADDLSIDRNNMFELSHWIAGRYS

SEQ ID NO: 167131 - protein, 154 aa, Heterodera glycines
  unsure (1)..(154): unsure at all Xaa locations
VCVLVGDEDPNVNGNINFIQXKDDSTVTIQGEITGLSPGKHGFHVHAFGDLSSRCMSAGPHFNPTNKTHGGPEDDTHHVGDLGNVLVGHDGVAKLYFTDKVISLVGPHNIIGRALVVHKLEDDLGRGEGLQMPESMETGNAGPRLACGVIGIAQ

SEQ ID NO: 167132 - protein, 84 aa, Heterodera glycines
RQHLLIVSPSYHFGLCCCCGVVFDVISPGLFKFAAARRVAWNKSSCEMPGILLDAAAEVMGVGGWCTAPAPTNACKFKAEDNCC

SEQ ID NO: 167133 - protein, 81 aa, Heterodera glycines
MEQQTKFSSIQQPKPLPKLSHHQPNNNTNNNKRPAEYLVNEKYKTILCKSFTINGYCAYGAQCLFAHGEGELRNQKFKKCW

SEQ ID NO: 167134 - protein, 160 aa, Heterodera glycines
MASNSSDASDSDDDDLFTHETDDGSDAMDSDDEDQSDEDANRRADALTMEQEKQFWSIVPVEQLKTEDGNSQSSDKPSTSYAASQAGLPPSQKKNQASSSSMRHPNVCLDDSSMPCSICLSDMREECDDDVVVQLSLCSHLFHKECIKSAFAVKRQCPLC

SEQ ID NO: 167135 - protein, 195 aa, Heterodera glycines
AGVFSIELTDRARNQIRPSADALSDMEDEDNEYENVEYDEIPTLSPSSSYINGPEGVETIELGDNPELVNPLYTKVGPEDFQLLKVLGKGGYGKVFQVRKVTGKDSGKIFAMKVLKKATVIRNQKDTAHTKAERNILEAVKSPFICDLQYDFQTGGELYLILEYWSGGQLFMPLEREGPFMEDTAVFYLAQIVIA

SEQ ID NO: 167136 - protein, 158 aa, Heterodera glycines
  unsure (1)..(158): unsure at all Xaa locations
IILANIRGFSGGQNDMXEMVLKFGANIVDALQTYTQPIVVYLPPFGELRGGAWAVLDTKINPTCITMLADPNCRGGVLEASGIVEIKFREKDLLILLRKCDPKINQLEESLATASDPTAKGQLLDEYKRRIEKLLPICRAAAVKFADLHDTNGENAPE

SEQ ID NO: 167137 - protein, 109 aa, Heterodera glycines
MNGGSERVTHPFLPPWDFSQLLQIHVHLNLKMASGAAPCSDQRNSAKAADKAPPPSQGHRSRKWATDGGAAAHCENCVVCGDRACNHHYYGVAACHGCKCFFWRSIKTK

SEQ ID NO: 167138 - protein, 97 aa, Heterodera glycines
FLLSFVCFCSSKKKYLFSSFVCSPMIWPLPSAANVPFPRSHRSVLSTGSEPSRTFGRYFSATAPNSAKEAKEQISKALEEGKGTQSKAKQMPSPLPA

SEQ ID NO: 167139 - protein, 74 aa, Heterodera glycines
STTASSPHIHSASNGGNCGKCGSHWLQELQVLGPKFEHSVPQSGLQQQQKRLEEIKLKFLPESPNHSFILNSFK

SEQ ID NO: 167140 - protein, 158 aa, Heterodera glycines
MFVDWWNHRGAYFVAKPHMRPALLDRPEWKHKFIKLKHIQLHFVEMVEGGAHESKPVMFFLHGFPEFWYSWRFQMRHFCAKYRVIAVDLRGYNDSDKPIGIEEYGLELLSADIMELIERLGKQVVLVGHDWGGVIAWNISMERPKLLHRLVVMNGPHP

SEQ ID NO: 167141 - protein, 115 aa, Heterodera glycines
AVFVRPFIRFVAMFSPFLRRIFFAFLIASFYFGGRTFHAYLSLSASNNPQTTAVKLREFVDGADFMERIQQIIREEVKALLVKAKRVDKREIEEERASPAFSFRLHMNFTKLFGF

SEQ ID NO: 167142 - protein, 144 aa, Heterodera glycines
SVFISDDVHLPTGMVLLQQRRWLCWVDAGIQQLSCIGLDGTGRRVIYAPLEYPFGLTVNGAEERFYWTDWEDMKIHSVFVFGKGYTQFLPGGGGKGRPYGVLSLPSKCRPHPPLCECMANNGGCAHWWLSGGRRGTTKGGCPDN

SEQ ID NO: 167143 - protein, 161 aa, Heterodera glycines
GIASVCSLLAIIATVVTLPSLYSEMSQMNSKVRDGVEAFRVNTDSAWTDLMDVQVVVTPPSKPRDNPFNSIFRAKRQLFGHCQCAGLQQPSCPPGPPGPSGPPGQPGQPGGAGQPGQPGAPGQPGQPGNSGQPGQPGAPGQPGKDSGYCPCPPRSSVLAVK

SEQ ID NO: 167144 - protein, 30 aa, Heterodera glycines
INPMKNNKCIHELFFEKASNNFVYGRRKRN

SEQ ID NO: 167145 - protein, 192 aa, Heterodera glycines
  unsure (1)..(192): unsure at all Xaa locations
MHSVAFSSLSTEEARLNFEQIFHENGFVRIDGVFSTEELAELRDAVKLIVEGFDPKDHPRTTFFTSDEEKHVSDSYFLDSVDKIRKLSVXTGAVQPRVMQSMFIFKQPKIGGSTNEHVDSTFLHTENGDNLLGVWIAVDPANLDNGCLWFLPGSHKDANYLSATRQYKFPRTETKHHGEKGIPPMGPLLKSW

SEQ ID NO: 167146 - protein, 99 aa, Heterodera glycines
MAAVSSAKSSSALKWVSLIVLIGQTTALVLTLRYSQTQKSHPSDGPKYLSSTAVLMAEIVVQNNLLFLALSKLDAATYQVTYQLKILTTGFFSVTMVNK

SEQ ID NO: 167147 - protein, 35 aa, Heterodera glycines
FFFFFFFLKKKFFFIKSKKNWEKFQFCIFSAFSLS

SEQ ID NO: 167148 - protein, 137 aa, Heterodera glycines
  unsure (1)..(137): unsure at all Xaa locations
IVARQLAKPITGYFMGLGKEHPAFRNXVFLPVRKTITYWFHKIANENLDLGSPTSGVYVSEDTALEQASFVIHQVDIFGYSVVVVYAYSYFTHPEEKDLASVDELTELSMDTSQEIMLLNELVTDLQDDMRMPPTDR

SEQ ID NO: 167149 - protein, 165 aa, Heterodera glycines
LRASLMTASSSSSSSVGRSALPPLCHQQRHTVHLRRAGPLLRFRAQAVLYERGHRLTVAVVGHRRVLRVADLLRQRRDVALLAEEGRAQRGHFVQNAAQGPNVGLGGVRQLSDALRRHVIRRATNGVRSADPVLLPAEAEISQFGLVVLLHQHIGRLQIAMDDIF

SEQ ID NO: 167150 - protein, 90 aa, Heterodera glycines
RRFSSFVESLASRDFEQLHCLDFAHLGLGSAAFMFMGEWRELHRIALKTYYSLVFMDHDMHILPSADESEADDASSSSGAVDSPTADHSQ

SEQ ID NO: 167151 - protein, 48 aa, Heterodera glycines
FYISTKLIEKYRIYFNSLLQWITILFSIKNKIYEFIFCNESIYLHTSS

SEQ ID NO: 167152 - protein, 156 aa, Heterodera glycines
LGPIPSLLKNLRPLTSAFKTEIRIGQVLNNRALLDQYCVLFLVFGFNRLLLVTSGPCLSCVRMNEDWHDYCNAMAKCCDSLRIKPCGLDDSDVTDDSDSELSPTSCLPIYVFNAPPVDQYWSGICENQPTDKCDSYEVNLCFLDAKKRCLPRMPWA

SEQ ID NO: 167153 - protein, 73 aa, Heterodera glycines
LQILRPLLAVSLLVTCCHGQKERKPKTGTTKTSTTTTTTTTTTTTTLPKMTTPNNTAANGGGGSGNTLLFILF

SEQ ID NO: 167154 - protein, 109 aa, Heterodera glycines
VNFCEDCPKSIISIYLPSVIVYFVHCFNLFVKIKKRLESVLSQTFQQMMTNGKKLVLEQVSYCLFPFVGSILFKQFQIITTIASVADAAQDHFAKFYGNLMRPLKYSSF

SEQ ID NO: 167155 - protein, 187 aa, Heterodera glycines
LSHFKLKMHLESRRNVTFPVWEAPFGPIAFHENDVSSEKLIKTDQTDEAINEKGNSFVHWLFLIFLLLILLAFCLFLISLICRRKIRQRIGRTYYVLQKSEPKNGGPTFEVLKTTGPIKKRRFGSRTDSMEPIQLAQHKRFFPLEGSFSATPPVTPTAPLLFAEQKPILRPILRHLPPPRLPSSSIT

SEQ ID NO: 167156 - protein, 74 aa, Heterodera glycines
NFNHFTLELHFGKTIPTISHPYVWQSPPPRGWHFVCRLISAAVLVFVVAFVRFFFPWGPIALANRSPWRTEHPT

SEQ ID NO: 167157 - protein, 100 aa, Heterodera glycines
KQKLIEEVHAVVTVRDAKHTNFVEFRNFKIVYRRYAGLYFCICVDIAVFYLYYLEAIHNFVDVLNEYFHNVCELDLVFNFYKVYSVVHEMFLGGQIREAS

SEQ ID NO: 167158 - protein, 122 aa, Heterodera glycines
PIPVIELSYPVSVIYCGECSMPVEYCEYSGKFERCQQWLERNLPDLAEKQMKIGAGDGKAADFWNGEETEAKKHQKRGGKGLPKARGGGNGSKEQSATVAQITLNTEVRIKNQVVTVDKGLT

SEQ ID NO: 167159 - protein, 100 aa, Heterodera glycines
WSSICCCCCCWCCRMSIIWCCSICAAASVPRGGAGGNGCWKRAPPAGGGCVPPPPFIGGCWHCSAATANENWLEWKRLLCSGGCIWTEDGRMTILAENGA

SEQ ID NO: 167160 - protein, 99 aa, Heterodera glycines
MFYDGSQWIRPDAINNIQQLPDSHHLSNIQLMRSNVDLVFRIVAIRNRDNKRLVNQHIFHRLKYKEATPSFHQWRNEHKQVIGLNFTNEQDAKMFYEAV

SEQ ID NO: 167161 - protein, 203 aa, Heterodera glycines
  unsure (1)..(203): unsure at all Xaa locations
QPILVLVTGAGGRIGYSLVLVIVKRDDYGKHQPIVLSLLDIPPLTEVFSGDHYQLFDCALPDLCXDQVLTSEEAAIXDIDFAFLVRAMPRXEGMKRKDLLAANVRIFKSQRXSLDEFSKPTGIVLVEGNQVNTDPLICDKYADSEIPAKNFNAMTRLDHNRAMAQAAQNCADGTTDGMVINRIIXDNHSITHFTDIRHDNIDK

SEQ ID NO: 167162 - protein, 171 aa, Heterodera glycines
  unsure (1)..(171): unsure at all Xaa locations
KQSLLFTRMYPHLIIYLDCPPEKXLENIQKRGNPAEVNAVDLEYLVNIQNSYKDFFREMRDECEILAYDWTTPQVLDVLLEDILEIDFETLDFYSSGKHRTWSLMGTDTNHCFWRHMVTTKDQLKERAMNKLGLLQTEVSELYIYPMDGIHHRNVIMHEVLKDRCTHGYTK

SEQ ID NO: 167163 - protein, 28 aa, Heterodera glycines
VFLDSNRQNDFDTHSLLIRLYILFQIKE

SEQ ID NO: 167164 - protein, 41 aa, Heterodera glycines
EPVGDISKGMAEADRKIRSVEVLKFSFSLLIFDILKKNKKK

SEQ ID NO: 167165 - protein, 105 aa, Heterodera glycines
  unsure (1)..(105): unsure at all Xaa locations
FFFFFFFXSFAFNSEIIIKTVTGQIDVKKVVSHFTVSSQSALNAVSDVFRKAPESDVPVLVKPLVRHRFLPETVAGLDDSNRETQKNDGDGQCEQMSAAGGHPFP

SEQ ID NO: 167166 - protein, 123 aa, Heterodera glycines
MPKTPKCTTPSLLGRVVRKLSSARKAHPHRFVFEPKKLLIDTDERWRPVEHIVLVFRHRHRLFRSKMRSLEDSCLVGNRRVLVWPDRVVDDPIEFVTTLYNRRKQCNELDDKEWTLFVEGPMV

SEQ ID NO: 167167 - protein, 186 aa, Heterodera glycines
SNLMSPTKKFVPKRLPPELLYEISLFVNPRNNLSSICSSSRVLHKFVYLRVAKFYHSSVEQLKTSYANARRSPSWEAVKSVASLARGLRDPCLDQFLAALEDALGTGRPATYTFEKISKERVGISLIQTKGGSETNRTHTVSKTSAGPAARRSSPGDTSRTHTVSKTSAVTTESSTSRFSLPQLFG

SEQ ID NO: 167168 - protein, 122 aa, Heterodera glycines
LLISLIIVGISHGHPVYEEVPVYPLSNSQGFYDKEKGEVNGSANGTKQAQHNAIPVSGNGTEVNSNSTVDTAFDNNFNGTASGVSKNAIPAPLVSGHGFNGTENKKHIGQSKTGKKTKKSSK

SEQ ID NO: 167169 - protein, 72 aa, Heterodera glycines
MVENKTPMLVSVSIRTHSDGLCFGPRNVSAAVDVFAGHHHHHRFADECRCSAKRRHSKSVFQRNSATIGGAR

SEQ ID NO: 167170 - protein, 68 aa, Heterodera glycines
DYQSECRRSCVLNHFKDASAAAASSSSRSVSWKALDEDEAPAGIGRRMPCSKGGICRFSVSGLGIFSW

SEQ ID NO: 167171 - protein, 144 aa, Heterodera glycines
ACQALNCAFGSEGLCQFKTLFLAAGDVPFVVPPSGEGIVARFSRGMRRAILKSRHFRLPSNEQLEMHLEASLSTFGSRLYICPDEQQKTVARLSMEKTGPNGVETDPLREFGYCELLMGPKVEQRMMERMVVQLDPELRHFSLV

SEQ ID NO: 167172 - protein, 207 aa, Heterodera glycines
MLSARTLHFARSRLSSFAPLCRASTSSVRHLCLLGRNLTRYRAKEPLRDQLQNALTKNIEAKAAPRADSIPPRPLRQVIIRGGLFFFVASNVFSMIAAVNDFEMTQKRFQSVIDQAIYEFRRTFSFTPPYKRKTEAAKLIWTIIGANVAIFLLWRVPTLVPLVWQYFSSGVASKSLCMPMLFSVFSHQNLMHLFFNMDVLNSFAIVA

SEQ ID NO: 167173 - protein, 138 aa, Heterodera glycines
MSTGVAVNDQCLEVFNELKLGKKYSYIIYKLNESMTEIVVEKTADAGAPYSEFVGCLPATDCRYCVFDFKYEHAEGGERNKILFVSWSPDDAKIRAKMTYAGSKDAIRRKLVGVHTEIQATDFSEVAQDTVLEKVSRV

SEQ ID NO: 167174 - protein, 188 aa, Heterodera glycines
MKFIRKKFIFSFLFCAIQLHYLNAKKFGGGGGFRGGGAARANPAPAGGHFGGGGAPVGGGQPHFVGGGAGGFHGPTGGGFHPPPAGGGFHGPPMSAGSGPGRFGSGTGLGSSSRAGTFTTALAGAAVGTVGGLVAFEAGKAIIHSFDRPFQHDGRNYYLDEKYAKKQHGEIQCKVPWDKLVNQSPAAT

SEQ ID NO: 167175 - protein, 99 aa, Heterodera glycines
IVKMRWLGQNWPLIKSIFGCFVRICVQNWALPISSSIFGFIFGIGISINKCIKLSDGSFGAIGSHWTVLWSDDGLAVFTKLITVSIRKLLINLSLALNS

SEQ ID NO: 167176 - protein, 94 aa, Heterodera glycines
  unsure (1)..(94): unsure at all Xaa locations
FFFFFFXLALILSSIAFRTMLRYLSKSLSSTRSALVDISSVHFSFYHPSKTSSPTGSLLLSEGEHSTASGSLVNVRMPNIKGEADGAVDHDQCM

SEQ ID NO: 167177 - protein, 121 aa, Heterodera glycines
LAQITPNVGGAADIVFADAPPKLSADETAKLVEQAHAELKEDDNLPTTRIQIVIPDTERPVDARLNQGHTVNQLRIFIVTADPRLAYRPFRLMTSYPTQPIDDEGLTVIHAGLINATALVK

SEQ ID NO: 167178 - protein, 136 aa, Heterodera glycines
FTSLDPSVKKLLGWKMGDEEEKWALKAVESLVKKMQKRKHHGYGTVEDLEYALSHPGSSSNCVTIPRSLDGRLQVSHRKGLPHVIYCRVWRWPNLQSHQIRILSTTDCMFPYDGRSEQICINPYHYHRIEMLGQSK

SEQ ID NO: 167179 - protein, 141 aa, Heterodera glycines
DVFRVLIRILSSESVCQKSVCFRVQEVAFPRRHFPPLRSLLSSHRFALFSLFFQLQLLPYLPTDLLLLLLLLLVLFSPNFCLFSVFLLFRRHHYDHRSLRCTNRIWHSVLVRRISQIIFDPFRQHSHEQFLSIASNRNLGA

SEQ ID NO: 167180 - protein, 173 aa, Heterodera glycines
EQPEKQQRQQETQPNSALSQEVEEKTTTTITMARASEAAEEEQQRCQNATATATVEEEATEVPKQQQQQTLLEQKKGKGEDQEEGWKEVRTKRNKRGSNNRNFANSRQWTTNGGELDFQFDSEMESVGNAADGGAEASEDKIWDDLDDAMCNKLIIVTQTPPSSGRKGTDVRK

SEQ ID NO: 167181 - protein, 18 aa, Heterodera glycines
VQLSLAKMENAEIKSQRK

SEQ ID NO: 167182 - protein, 79 aa, Heterodera glycines; identical to SEQ ID NO: 126123

SEQ ID NO: 167183 - protein, 134 aa, Heterodera glycines
  unsure (1)..(134): unsure at all Xaa locations
GQMKTATAVAFSKKGNGLIRVSGRPLRDYSAPNSAHQISSSAILIVGKDSFAGFDILLLVEGGGHIAQIYDDRQPLAKSVAAFYQKNVDQQLYXELNEQFIPYNRHLMEADPQHLDPKKFVGPVTRARYHKSYR

SEQ ID NO: 167184 - protein, 59 aa, Heterodera glycines
IKFSSFRSLTSAQREKHTLPDLPYDYNALEPAISAQIMQLHHQKHHATYVNVLNTAEEK

SEQ ID NO: 167185 - protein, 71 aa, Heterodera glycines
MGFLTYAVVSVVGGAVAMTGVGLPIAGLLGFSAAGPVAGSLAAGAQAYVGNVAAGSVFAAVQALAMAAPTP

SEQ ID NO: 167186 - protein, 37 aa, Heterodera glycines
AFLRNHKHVKVNTYKTRQWFRECNKQLTIINDLSLVL

SEQ ID NO: 167187 - protein, 68 aa, Heterodera glycines
SRQDSSLLRMTQRFLELHATGGILNLNDAAQLVGVSKRRVYDITSVLERIEMIEKVGKDTIRWKNYDE

SEQ ID NO: 167188 - protein, 60 aa, Heterodera glycines
  unsure (1)..(60): unsure at all Xaa locations
PPCRTSRTSRPPRPTSMPCPRRTKVLPPAATRTRATAPPPLLPPXRVPPGPPHDRSRPSP

SEQ ID NO: 167189 - protein, 115 aa, Heterodera glycines
PFIYYICAPNKYLSVLHICCSRTQQSGPKAVRVLSKFIGRLSRRRVLLAVTLCNVWTRAVGLMCRSPFLSLDKPNTATTFGLFHLFTTSSTLSASSLSLLMGRRRRVKRLLAVSL

SEQ ID NO: 167190 - protein, 67 aa, Heterodera glycines
LDYDDESNNKRISKSIPVIHNNSPLSLGTEHVTGEVTGSCLLFLMKTHTLHYFTALKNTPWRGSLRA

SEQ ID NO: 167191 - protein, 142 aa, Heterodera glycines
  unsure (1)..(142): unsure at all Xaa locations
FFFFFFXYSLAFYPTNAVKKNKQKSAITQVVGSPPKFAPIRKSANASHSIRSTLPGYASPTEALAPIRTARPCSGPMQQRLDDRALHRAQCPLCYPSPPCKSSPRRALPMEQKRYFPAPMPSSFRWGVLLLRVAAGRDNEVF

SEQ ID NO: 167192 - protein, 210 aa, Heterodera glycines
  unsure (1)..(210): unsure at all Xaa locations
LMCRPTHFNVKYEINPWMRPGDPVNVQKATDQWERLKRTLEESGAQVEVMEPVGADNYPDLVFTANAAVVRGKNALLSNFFYPERKGEQHFYDRWFKQNGYETFKDLHVPFEGAGDALWIGKSKLFCGIGPRTDVRALTLISEKLRDYGAPFKVYGFRLIDPRFYHIDTCFCPLNDQIASYXPCACDPVAGDDMSDEVELVPVHEEGAMR

SEQ ID NO: 167193 - protein, 173 aa, Heterodera glycines
MALVSKWRSDPFGRSDWPSLWRDRFSRDWDDWPRDWPRPGELMERFRSRDFDRDRWWRDWPTDWPRMDAIVPRFSSHLDRFDRNWRDDPFWRDLYPRWAEPIFKDGIDVKTNITNDSNRFAVEMDTYQFRPEELQVKTMDDTLLIEGRHEDVRDRDNYTKMYFVRKYQLPADV

SEQ ID NO: 167194 - protein, 51 aa, Heterodera glycines
NHKLTIIIFFFSFFKFILTPAGVNVVLFFPSHWSHPLICREIIISHNTYYN

SEQ ID NO: 167195 - protein, 132 aa, Heterodera glycines
MFSWLGKNTTNKKDQDVLETVSEGLKKIYKQKLYPLEDFYRFHEFHSPALDDPDFNAKPMILLVGQYSTGKTTFIRYLLEQNFPGIIIGPEPTTDRFIVVMYGEEEAVIPGNALVVDSTKQFRALTKFGNAF

SEQ ID NO: 167196 - protein, 107 aa, Heterodera glycines
  unsure (1)..(107): unsure at all Xaa locations
MNCVPFFLSFRCTSLSFPFSRRFMTAHQASVALRPFYFAVHPDRFATEPNIRNNNEKALQPFPEANXQQQPVQVDFFVRGKDNKFRSVRLSLSGFDVEQIVRTTLEF

SEQ ID NO: 167197 - protein, 151 aa, Heterodera glycines
AFFTRHWGERFLPHKTLCSSPTIPKITLEHFRHYLDNTEKKHRQYLRVRKTLHRSHGHLIREQIAPDEIPSIFFSSAFSYRDSATFEAGFLEPRQGEADNIISGAEQIRGAVGIDSLYRPASCGSLSSMQRVQMIIAPADEACHGRMIPRS

SEQ ID NO: 167198 - protein, 103 aa, Heterodera glycines
HLKQQQPHFAASVWHPSHGQEAGPGSPSVSVFIALAKEGRRRWWHCWRSGCEERRRQRRHEGNGIGTAAADQSVAAHCQIRRLLLNHFVPAVGRRLPFLCWAT

SEQ ID NO: 167199 - protein, 80 aa, Heterodera glycines
VIENIFRIIRHIRPILLSRFSPLSFDRLHPLLVLVLLPELLMVFLDQKQIIFTHLRPPAAQPRHEKCQSFRQFRFLQPSR

SEQ ID NO: 167200 - protein, 199 aa, Heterodera glycines
  unsure (1)..(199): unsure at all Xaa locations
QLYLFNHSCTSFNHSCTFSDHCCTSSNHFCTSSSNLYLFNLCCTSSNHFCTSSSNLYLFNLCCTSSNHFCTSSDHCCTSSNHCCTSSDHFCTSSNHFCTSSNHFCTSSNHFCTSSNHCFTFLXSSCTSSNHSCTSSDHCCTSSDHCCTSSNHFCTSSNHFCTSSNHFCTSSNHSCTSSNHSCTSSNHSCTSSDHFCTSF

SEQ ID NO: 167201 - protein, 193 aa, Heterodera glycines
MTLRMALMEEITQRSRKKEKNRDNTEKDGEKCEIGQQKQRVEEKQRIGERRKAEEDEEEQQQKQRNARVTERVERKQANEERKEVAEEQRKRGKRRSGERHARKSLFSSSSEEEGAEEEEEEKEKAFNISTKPSLPVLENRRQKLENGPDSSLGRSLSQRPLSVQSFGSSVGDGTTNISDDRKTTVSGQTPSL

SEQ ID NO: 167202 - protein, 128 aa, Heterodera glycines
KFELGLSGDQFPSIPPITFLFVPRAIPRRPSVAHFGCPPLGNAFVAVFRLLFRCFSFCCFLRLSFRTCQFFPLPLISAKRRPSASVCSFRTHTGAAWSLGWHWPNGTSASSAPHRRQIRLPIFFVPIA

SEQ ID NO: 167203 - protein, 140 aa, Heterodera glycines
IKFCIFLGEQLKVYCENDVEILMEAILKFRQLFLDITDGMDVLKDSVTIAGVVMRIFRTKFLKDRHIPIMPEGGYERADNQSKIAVKYFEWLAHREGIRVRHAENGGEIKFGDLKVDCVIGCQKRIIEFQVFKNKSHPLM

SEQ ID NO: 167204 - protein, 96 aa, Heterodera glycines
PKPKPKTLTKKTNKLKPLALNRPKRCHSFSQMIISFRLIVIYFACFSHSVHFCSSRAIGQRTNKKAFLKFTFWNIIFKVFLSFFSILPSPTVALDT

SEQ ID NO: 167205 - protein, 128 aa, Heterodera glycines
NPKNFPVNADKSTQISKIFRVSSVGSTRPYPLFPKVFLILSIVLQNVPLTIRTLLAAGIRIWMLTGDKLETAVQIAQSSSLCHKDTELMVLAERRFDTVLAKLQEYTLKVVKGGVSARFGLEAAEQNG

SEQ ID NO: 167206 - protein, 206 aa, Heterodera glycines
SASTVIQSVLQQVLSEDISLAANNDENDGEEDTKKQNGDVPHEQKELKEDNNSKKAGHGTDTELSSTNVVVHYENLVDSSATAPPRPPQPCHGTSPTHHKFTANITTNTNNINNSKSIVSADNTSPKHAPSSSSQSEVLSILTRKQQQQKTLQLSANKKFHRRSASDRSPAKLDKLPQCKSPRPTHQKSSTWEPHQAQQQHKLLLG

SEQ ID NO: 167207 - protein, 60 aa, Heterodera glycines
FVGLGRALRARYLKFVDSYGRFAPVTGASRRFFNFCWPWTGASRPFLNSLNSYGRFAPVF

SEQ ID NO: 167208 - protein, 208 aa, Heterodera glycines
EGSIVFPRVPLIIVEGPLAVCQLLETPLLNLVNYASLVTTNAARFRLAAGESIGLFEFGLRRAQGPDGALSASKYCFIGGFDSTSNLLAGKLYGIPVSGTMAHSFVTSFEPDEPMKRPNLLLPNDKVVDLFQLSKDKLDFLFKIDSIDWEVARNDLNMGELAAFCAYAIAHPKSLVALVDTYDTLRSGLINFCACALALADLGFRAIG

SEQ ID NO: 167209 - protein, 84 aa, Heterodera glycines
NVADVAAGVILFFSPKYLFLGPNFPCKIENIDPIECDACYRIFYNQKCFKNHLEKACKFYKRCVDCDKEYYNDHQHICGKYYFQ

SEQ ID NO: 167210 - protein, 105 aa, Heterodera glycines
LATLKFVHAVWRHGDRSPSKMIPSDQTNTLDKWKAKFGGLGQLTADGAQQHFNLGRLMRHRYDGFLSCKFTPEEFVYRSSDYNRTKMSAIANIQGQLGGKGSKSN

SEQ ID NO: 167211 - protein, 166 aa, Heterodera glycines
LLFRFCVSSAVDHLSVSPFGTLSHRRNCDIVSYNFSALVRNARPFDSADRTFVADTPLGVVLRRRFDFSSPLTANVSVHLSVLSANNKLLLFSRFSSQMPSPAEGENAQTFQYVNYGNVLIFQLRAKCADGSVGQKCTEICAPPKAGDHYFCAADGMRCVPGWGGT

SEQ ID NO: 167212 - protein, 215 aa, Heterodera glycines
  unsure (1)..(215): unsure at all Xaa locations
MANFCSVLSNHFGLFLLFLAFGSNGQQREHAAEVRAVKGKLFVHMLHSAYFFPQTXRPTLPHWLHLFPSRHRSIAFLLGTPVSPHSHFPIHIIARRLDTFQSSERSFAIIASDDVQFDGGAQQIAEIKVTNVDAEELIWELIRGHKMAKGLERAIHSTFRGRGVNPFVFNILPGTPNPPTDEVLHQLRHQLKFGAIVQVGTQAHFHSNVLQLARG

SEQ ID NO: 167213 - protein, 199 aa, Heterodera glycines
GARRKKSGGSHPRKQSMVSFLFAAISSSAPSIQNRRRNRLPPPRQLSVPERGSLVDLNSEDEPFRLVQKAPSVTVSASSSYSNQRTPPTNRMSRECLSGSQTDGMPPSGHSQFVLFGFAFGPRSSSFKSLIPSFPLFLWHFRSFLSVGFLPIIRRLSPSRIFWLKLTQSVSVRLSPAHCFCVVWTRSVSNEATKIYQLN

SEQ ID NO: 167214 - protein, 159 aa, Heterodera glycines
VGPSAKMVLCPLSLNRQLGCTCTVLSESHSVQILCNGTQPDKVWAVLGGFAPNIDKLAIRRCTTNKKSSILKNMLPLKVRSLEISNCAIAQIQPNAFDSLADSLEELSLESNALTSSESPQIKACQIPQLQQQFGQRTVRFDVFWTQGVEISATSNEQT

SEQ ID NO: 167215 - protein, 72 aa, Heterodera glycines
KLFFIPKNRHIGRFLNPPCGRKTKKCKTYKFITWSIFNQINNSWYHSIALGVFYQNIILLNFLLKYIKRYGN

SEQ ID NO: 167216 - protein, 90 aa, Heterodera glycines
GVCPPNSFLFVSSLRQTFLQVLAISAVNTFCGLIYIYMQFFRISDLLIYLASFLWVWAHGLPSLIYLTMNKTIRRDIVNFMDPNKSNMGI

SEQ ID NO: 167217 - protein, 146 aa, Heterodera glycines
ARLSSFFESIGWKVYTVPETASILLSPGRIRFPDLSRDQAAQFQIDLLKTLIQIENVFFNQAELSEAEKIMIILDRGAMDGSAYIDMESWSNVLSACGVDNHEMRERYHQIYHLVTAADGAQSFYQLANNQARTEAMEEAIEIDKK

SEQ ID NO: 167218 - protein, 175 aa, Heterodera glycines
GTGKTATFCAGILNNIDYNSNECQALVLAPTRELAQQIEKVMRALGDFLQVKCHACVGGTSVREDARILGAGVQVVVGTPGRVFDMLRRRYLRADSIKMFTLDEADEMLSRGFKDQIYDIFQLLPPKLQVGVFSATLPPEALEITRKFMNKPVRILVKRDELTLEGIKQFYVNVD

SEQ ID NO: 167219 - protein, 217 aa, Heterodera glycines
QEHARKAGSTPKSPRQTTKAPSTTGEGTSTETMPSTSNAEPRQRPSPRPLSTTPIRRHVRTRPTTTDQTTGTDSRAAVQSTQTFLETVETATQTETEQGPIQRLCTELNKAKRRIGTLERQLQRKTEEMKQLRKRPTEHHRHKLKRVSSLDDLSRQSRTTRAKEIARNLSHLFRPDTPIPEIDKVVRQARHQANFISPKKSLGKWTRNGRTRKKERI

SEQ ID NO: 167220 - protein, 89 aa, Heterodera glycines
IFFFNLRSDFRARVWTPDTCEFLIFIHRFQFKFISLFSYHLLSYFYHDLVRVLDKILARDFVVIFLVTDFHGIRYFPGTKTHWISISLV

SEQ ID NO: 167221 - protein, 182 aa, Heterodera glycines
EHTSSNIVLSLWTTSRARLKLLDYMLQCYNTPGTELLYTDTDSVIVRHKRDLVPVHTGEYLGQMSEEYADYDILTFACGGAKQYAMKMVHKQTKAVKFVQKIRGITFDVNNSQELQFEHFVRKVINYGKEDEQENAVVFNYNKIQPTKDNRIITRKQNKKYLPVCQKGIINQTLEVLPFGYE

SEQ ID NO: 167222 - protein, 199 aa, Heterodera glycines
MAQVDDDYEANKRVADSLREYMGRRLNVANAFETPILEGLMAAVKVEPLQRIGTVLDASARCYAFRVDNTYSACYKVLSAASGGEKIAPFQNDDWQNDRDEVETVNANDEGGDKSGTIASGEDGEGSGEGNKRDKNKLSKPLDSSRKAKLLTRETHQLAEGLWKRFASAQHFGDTEDDLHALFDQLSTDVTGTVMKRRL

SEQ ID NO: 167223 - protein, 65 aa, Heterodera glycines
TIEFDFFELFFTMRFFYYFLLNSLQRVTGTWCTEHMRTVLNSRPLSSAQFPANEFGTTRAGTFPI

SEQ ID NO: 167224 - protein, 158 aa, Heterodera glycines; identical to SEQ ID NO: 127570

SEQ ID NO: 167225 - protein, 118 aa, Heterodera glycines
AHMNLELQQRSVEFSRLLSKDELRNGLLERMPAIEHNALHTAATPIEMDDNHQELIVAQKEHQSQKPKADEIDLLGLGNTDSPALVDILFGGGVPNVQPLSRNIGKDPIDDLFSFESR

SEQ ID NO: 167226 - protein, 214 aa, Heterodera glycines
VRLVSPAFTCNSQPKTASSQSKSYSFADRVIETLSLYVQSVEIFFESDSGTDFDFGGSISLYSLALESISPNWSEEKDVDTNLTRIHDKTIRQVLFFKQLSWRLLKIEASAHPKCGADEQREPLRSKTNSPLRLLTVDGKCRISIKKSSQNCSLLAGKIELILKEIHWLATMLHLRMAIDFHKHLVDLANCQKKADSVTPFLGQRQNPFTDASS

SEQ ID NO: 167227 - protein, 100 aa, Heterodera glycines
RSATDRTSRRWPDGSMEEAAEPADADSLNDLDLTLDGSAGTECRFGIGRLDGTLPFVSAIVRFFVLSLSPVPSLPALRPRRRLTKSGDASQTRVATRRRL

SEQ ID NO: 167228 - protein, 213 aa, Heterodera glycines
KRLDCISYLAKEAKNRFFGIPDRHNLKMFRVIISTLSTSSYLVSAGGLRGFFTHLIVDEASQATEADTWIPIGGLVGPQTSVMFAGDPKQLGPVVRPENLKWFGFDNSLMKRIMYGDVYSQADDRVFVTLKQTYRSHYAILRPCSYLFYDNILQVDDGQGDFHKLTEWEGLPTKGFPVIFHSSRGSKDEQGFNRSHHNLFEAELVRHYVERIL

SEQ ID NO: 167229 - protein, 108 aa, Heterodera glycines
DLTGANNLLDEKEKKVEEAEAEVGSLKRRMVVLEEELDKREEGVKLATEKREEGTANCDESERVGKVKENRSLKEEERGNGIEEKLEGGRIGWGEEGGAKNRKEVGWK

SEQ ID NO: 167230 - protein, 115 aa, Heterodera glycines
GCTWHGCKKCYPNDNMLLPSGKTAGQVRERDSKRMEFLREKVNRVDVYWECEIHRMLERSKEMRKAFEDYVDDGPLVIRDAFMGGRTGPLKLLRKAGPGEKISYYDFTSLYPYIK

SEQ ID NO: 167231 - protein, 85 aa, Heterodera glycines
GQPQLKGSYPKLARPTQLKVVPQASKVKKSGDPPLLRSAREELHRLHPARSARLWLQESARGRHTCGRKVLHSRSLYGPFSCPAY

SEQ ID NO: 167232 - protein, 193 aa, Heterodera glycines
LNPQPQSKNLIATAGRDKYIRIWDWSKSTPHFIYTVETMAIVTRVSWCPNNSWHVACCFASPSGFAYSDNIVYVWDIRRPFIPYASFDTHTKTCTDMSWPRFGSGDQFLSCGKDGKLAVNFADDAHHPILYANSVALDSNSPFDEITVAVPSDLRKSSSVVDPFRRKVPSNLFCAFPSDPFLMTSRAVSYFAE

SEQ ID NO: 167233 - protein, 95 aa, Heterodera glycines
SFVFLGWPAHQFRLVLCAEFHNFLDHQLQIPQFDDQHAHASFVQVPRLPEHTAHPSCSRSRLSQCLKLSNIFFLLYSQTTIKKLSPFQCNHFFHV

SEQ ID NO: 167234 - protein, 203 aa, Heterodera glycines
ITRDVERRMSMKAKEAEAKAAKSNSDVNNESADDDDDVFGSHQHRHTGLDHGVRRFARSYGVGAVDFFRGAVRKAKQIPEHLTRNVSMSRSTKKSEIIAGENEDGASSIADSDIDQLSIAAAASEPNAAMPAIATPSTSAGTATRKWRFGSAEPPRGNTPSVSTPPTTSAAATSSTQGQGMNSSAPSSSAPFARTGVCRSKNA

SEQ ID NO: 167235 - protein, 207 aa, Heterodera glycines
KVLNEEEEAEGTQPGTEPTNQYIQTTFIHRDANDDDREFAQFTRLMLAYVRPHLLALAHVTVDNENIDCSVDDGHPRCGEYPMEKPFHFLVVEDSRSGAAVYSIERMRNWHAGGSRARTMARIEAALLDALSRHSVHPLTLYASESATNELCFVREVSVTELEQLIRQNHAKRSSAASPSTGPSIFTRSPTELRLLNDRLLARRRVD

SEQ ID NO: 167236 - protein, 81 aa, Heterodera glycines
SMFVCPSFSPSVQFLFSLSLFLSFVTLLRFFFLFGAKQQMLCLADLLISFCLLIGTQLACRVSVRFIGPIAMAHPKPINSE

SEQ ID NO: 167237 - protein, 122 aa, Heterodera glycines
GKKKPKSKTKLQNSHLKIREGRKHSIPSDQNGDESYGRHLKIFLQFTTCLTASAAGCRSLYRSCCCSTGSASWISSSAWCRRWCCAASASALFRLLFSRFCGPFGRRAPPGGHLPNWAGPRG

SEQ ID NO: 167238 - protein, 63 aa, Heterodera glycines
AYSNGGTRIRCSSSRALQTYFCFFSISSLNGVKTTFVNCFAFNKPIIKIIIGTEVQAYADFVS

SEQ ID NO: 167239 - protein, 89 aa, Heterodera glycines
LIINCRHNRFECSSPSFRWLSPPSPSRGWAGSARVGKWRAPRAAERHRTRRFVCATSARRAQGTSHAPRWSDCQHLLRGGIINMAISEL

SEQ ID NO: 167240 - protein, 144 aa, Heterodera glycines
PWESNNDQQMCHVWTSLAPADLCARNSWARLRRMREMSLFTKCPDGFTNLQLIELFRLDWRRIRSEEDLLAHSDHLRDGPWGRGCLIGPTNSADCLHCFERLRRAIEQVEAVHWAFANLLNRFDCRLAKFGLASATAALLAQHD

SEQ ID NO: 167241 - protein, 143 aa, Heterodera glycines
LTSQTDHPSAADQSFLPLPNSSAVVCRGMLFRLTLFVLLPFVPSIADEFRHRKFEKTGREIRMATKVYAWGYQHLQEEIASSSAIDDIRLRSMALRTGRLPNSSGIWKRKSKMGTKNDSNANEQSVDGQHQKETMTAHARLIE

SEQ ID NO: 167242 - protein, 72 aa, Heterodera glycines
FPAEAKLPGGEKAKGLLKGGKSKGKGGKAGERGERGRQESRECVDAFVLLVTPPPPPPIGFFWNSFPPFFTN

SEQ ID NO: 167243 - protein, 48 aa, Heterodera glycines
FFLKIAKIYKMPNFLILSCHYGTPTKCPSHEMSKRVKTHEMSKIFQNL

SEQ ID NO: 167244 - protein, 211 aa, Heterodera glycines
STQLCPINPHIGLFQCHLMPFGVSSAPSIFQHLMVQMCAGIPGVFACVSDGLIATKSLEQRIAPLYTLFGRIKKYGLRIQLDKCKFLQHKLLFLGHIVSANGIRPDPSRSDAIWKMPAPIHKSTLRSFLGALNYNGRFVKCMRELRAPLDRFLQKDVAWNWTSEQQNAFEKAKEMMTSDLLLTHYDPTRPIVVSADASKDGIGATLSHTFP

SEQ ID NO: 167245 - protein, 61 aa, Heterodera glycines
FSPNSSPSSSLVGEGRGRIFLCVPSQFHPPPPPSSPFPSRPDIIPSNRYFLSMRTLQSMNE

SEQ ID NO: 167246 - protein, 199 aa, Heterodera glycines
  unsure (1)..(199): unsure at all Xaa locations
TDCVRCMHTDPKWGKAAEEAMRYFTSLVETLNXNTELYEALRLSLEREQLDAVSERTCRLLLAEFEQSGIQLASVERKQFVKLSDEIFEAGTNFVDGCERPVKLSSDEQNQFGVRTSHLNGPWTQQVDRRLRWFSYRKYFEHDEQQETFLRRLVSARHNLALLTNFQSFAHRGQSNSLLGTYENVYSFLGTVIEKFVPK

SEQ ID NO: 167247 - protein, 81 aa, Heterodera glycines
MELIVRLGSYGLIHGDFDEFNIMLNEDESPILIDFPQMVSMDHPNADFYFDRDVQCVRTFFNRRFKFESEDWPRFGDMVRR

SEQ ID NO: 167248 - protein, 73 aa, Heterodera glycines
MTALCGKTKELPISTILERLLCTPGPQLLKDLTGILLRFRRMEHVILADIEKAFLQLGIRYVDRDACRFIWLN

SEQ ID NO: 167249 - protein, 191 aa, Heterodera glycines
STAVSQSANTPLTNVPAIPHATAPPQGMPIPKIGVIAAPKLVETSTQQAQNLLSQLGMSTSAQRVFSGQQPMANVHAPISTPTVAMFRPPIPTATVANLLGQQPMPSFGAVPSIPSNLLGTLNSALGVPMAIPPVHFNQHTMPPMVGGFPSSMPPQQPPMMNPVEMILYSKMQLYSRDLASIDNIAALIEY

SEQ ID NO: 167250 - protein, 98 aa, Heterodera glycines
SRIHKALLEQCGRKYEISVDANFAEQLREKVRSIEAKKSGIYGTEKQMAEAIEKLRLSVVQLKNNGTQKRQECAKLSQAIASVGGEGTANAGTNHANH

SEQ ID NO: 167251 - protein, 98 aa, Heterodera glycines
LDAWYDTLVYEVALRCWDQETATRGRYHRASLYSRQGTKRCAGGHAQQLQMARAWLCCEQAALRHGLRALNRWSQEVGLRYRGAAIVLQVLPVEHKGS

SEQ ID NO: 167252 - protein, 153 aa, Heterodera glycines
MLSWLLNGPLSLLLVLSGIVLNALCVVVFVRFRRNVSGGTTPIIHYYLISLAGWHSALLFNAFLLYCLPTMLWGSVVSSGPYVHLYPPTYALANATHTGTVWIILALTLDRYLALCMPFKHRIFSKRSRVKRLVVGLSIGALFFCLPRFFEVQ

SEQ ID NO: 167253 - protein, 57 aa, Heterodera glycines
VYTNQIGLISDHSISDFPSFPPPIFGFSNTLSIHKAKYHSHDPHREFAASFFFFVNK

SEQ ID NO: 167254 - protein, 170 aa, Heterodera glycines
IFFLFIKNHYFILFIFILNSGTNFNRIWRHLTASAAIVSQYQQQQKQKHGTNNNNNSNNNSNNNSIKGSNKRLHRQQRVVVDVHGHGRQQQKQRSLTQQQLYTTTTTFTTENRRRSSRRSSPSCEPSSPAAAAAAPVFPQGSGCRKFSFKIGIFREKKFTMPSNFAKSNL

SEQ ID NO: 167255 - protein, 183 aa, Heterodera glycines
EPNGIEFKEEGSESDSCCSSIVQVYNSGSCGSKKWTVEALYESCRMKVRMTGSGLMMDAEIISKRKEPDGTYRFYVHYVDCNLRLDEWVAEDRIDLMSVRIPQRVKKSASQQAIAQSLDQSFDQNFAISDAQSSRSSTPEKVIEMFRTPTRSLTGSRKRKHLGHTIEYVDANSTSSECCPSVT

SEQ ID NO: 167256 - protein, 82 aa, Heterodera glycines
LYCGVFHLLIQNQFRLRLWRREGVLLNSDPILGRLMESIKRRVCVSFSHFMHWEPFRIKTFRKNPFSSPSRKGICTEIRPWS

SEQ ID NO: 167257 - protein, 116 aa, Heterodera glycines; identical to SEQ ID NO: 155645

SEQ ID NO: 167258 - protein, 122 aa, Heterodera glycines
CFRLFETLSEEAGYQEEDNEQLPTPNNNRVIAVTANSIFTVNKIFENGGVTAIGASPSKKKSMRERMARFSIGGLNIFESESAIAFAMSERRNPKEQAPHGIELKMQEVPVNALGDENDETV

SEQ ID NO: 167259 - protein, 98 aa, Heterodera glycines
TFGEEQRKELLEPLLKEGWETVQERDAIKKSFTFKDFNQAFGFMTRIALKADKMDHHPEWFNVYNKVDITLSSHDVQGISERDVKLASFIENVFKTVK

SEQ ID NO: 167260 - protein, 111 aa, Heterodera glycines
FQTAQCCAPLNVGLFKLEFRSIGRKGKEERKHTGILKVVLLSCGSSIGGSSCHSSSGSGAISQWQRPSIVHMLNGITLRHHALTNRRSLPVGILSRRLMSETGPKNWLKRP

SEQ ID NO: 167261 - protein, 135 aa, Heterodera glycines
  unsure (1)..(135): unsure at all Xaa locations
LMHIYELQWDDIEDANATSDADQRIHDRSGIPCTXYSTTKKPGFRRRRWRHRSAGLDFVRHHYCLLPHNGVDYYADDDDPXDIHLVERYINKARTIGIWAVGLAGTAIEKAPHVENGTITICDRDYAPKRRVAVD

SEQ ID NO: 167262 - protein, 205 aa, Heterodera glycines
  unsure (1)..(205): unsure at all Xaa locations
MSSTTFTLISVSSLIVLLVGYYVQRYGMPPPPPKIAGIDLGTTFSSVAIFQPQTGETIVLKDPLGKRSIPSVVGFLXENGEIVVGTRAVEQQEMNPENTIYDAKRFIGRRFSSDDLQFESDRKRYPFTIKLDEDGFVYFEVHQKGVKRKIRPEEIGAIIIKYLRKMAQNHFNVNIPEVVISVPAEFDQMQRNYTTKAVELAGMNV

SEQ ID NO: 167263 - protein, 54 aa, Heterodera glycines
RGNPFFKCVFFVHLNIALAVYHFTMIQRTLPPTVLRRDPVEAFVGQMPSSYAKL

SEQ ID NO: 167264 - protein, 50 aa, Heterodera glycines
MCAIAANCGRKQFLRWKSDFFLPKSMSTLVTQETCLYDFLIWIPTNVIQW

SEQ ID NO: 167265 - protein, 123 aa, Heterodera glycines
LFAQQKRLRVSDRGLIWNSDLIETLELQNLLINALQTIVAAENRRESRGAHAREDFPVRVDEFDYTKPTEGQSKKKLEEHWRKHSIIYQNVENGAVTLEYRPVIDTTLDKSETDWVPPKIRSY

SEQ ID NO: 167266 - protein, 234 aa, Heterodera glycines
MFHFIFPFFLFPMPTLLKKALPSSHYPSSPMCRPLACRSASASDPSHLQSDDGIRPVRPPIARDSPRRRLFWSCFVVLCVAISTGYGSQLKFSLLNTASDHFYPPFLLMWLNNCCLIICFPLYLIFERAKSKDRSVREITNESARIVAEKGVKSGLAKEVFFLLLYTVGNYSYALSLGRITSSAALSVRSMDVSVVYLLGHFILHERFVGLKTIAVVLATGGVLLIAQDHQFAA

SEQ ID NO: 167267 - protein, 162 aa, Heterodera glycines
SSSVSSFPSSSAVFALFAAFCRNFVRFVSRALFQKCQCCAIAKSAPFCSVYFGRLSKRKHWQYVFNRAKFKCAQRKCQLWTNKCFSAISLEHYLLFAQSIQTCASAATKFQQFLMNCELMISAMLRFLNVPMPRKQCQTIDLTDNEIGMSFLPNSILFYFFS

SEQ ID NO: 167268 - protein, 70 aa, Heterodera glycines
LPIHTKKLHCLCLYRSLLFNCPSQNSSFFNHLCRNSFKTFVLIAFLNRSSKCVPQQNDTFFLYFFNSTLF

SEQ ID NO: 167269 - protein, 106 aa, Heterodera glycines
  unsure (1)..(106): unsure at all Xaa locations
RTPSPRRRRPSPAIRGPRRRSRSPRHELAAPSPPPAKTERTPEPPPRRLCVLNLSRNITKAHMEEIFALFGALRSXELPMDRVHVHLPPGCGYAEYENAEDARERS

SEQ ID NO: 167270 - protein, 115 aa, Heterodera glycines
SLRLLIRHRNSLFRFAGDCCRAKANACFSRRNGSWNGSNSVGLEWERSLGRRGTAHFAMARRPNDAEKGGLTPHLLCQFLFSSPLSTDCPCFVRRINEGPRGIHRNALRSAKAPF

SEQ ID NO: 167271 - protein, 47 aa, Heterodera glycines
FFFFFFYLKLLNFNALDGKKCKNKQQKNEGNKLNLRDASKTNSKRWS

SEQ ID NO: 167272 - protein, 130 aa, Heterodera glycines
IGYVIENLSNRKLFFILSLLLLLQSLFFLLGALFAPGPSSSMEFVLSACVDKSSGKSGEWFTLRPDKTQNCVLVPDLKQHSPLSSDARDIVFGAQMPHMRDGVQLRYSPLCQFLIGLLDLEVEFSLETTS

SEQ ID NO: 167273 - protein, 36 aa, Heterodera glycines
ALFAVRENRYMVLNTDFNKAYKQVVKKDSDEFAFYK

SEQ ID NO: 167274 - protein, 169 aa, Heterodera glycines
  unsure (1)..(169): unsure at all Xaa locations
RETATAALKLLDNEWFLNSTRLFIYVSHEHEICTEDIVLTALKXGPEVFIPTFXKGAERMDMLRLXSDKEFDSLEGTLWGIRQHSSSLSPLSFEETSAKAPLDLVEVPGVAFTTSGKRLGLGRGFYDRFLNEXHNNTEQXPRTIALALKERLVDDLPMESKDRMVDEVI

SEQ ID NO: 167275 - protein, 117 aa, Heterodera glycines
  unsure (1)..(117): unsure at all Xaa locations
THDQLNHSAGEVLKQSQENIRNFRXTIELQIALKLYDPQKDQRFSGTVRLKHVPRPKTKVCILGYPSHCDEASADGIPCMTVDDLITLYXDNNLIQKLTSRYDAFLASESLITQIPR

SEQ ID NO: 167276 - protein, 141 aa, Heterodera glycines
IRLAFPNINISLNTLLSKIIGPRRQGIQQGILQMSGAFARALGPITIGNLYTVYGPQGIWIIALSVIFTTLLLWMLFFPLMVPLSLPDENERHHPTEKTTDRPPYREERTPLVEQSDGRGQDAEAAENGNDATVTTTASLR

SEQ ID NO: 167277 - protein, 186 aa, Heterodera glycines
AVGTPRLPCKIMVRGRGSLRDAAKEEMNRGKPNWEHLEDDLHILIQCEDNEKRARSKLDKAVDKVKKLLVPSRDGIDELKRKQLMELSIINGTYRANIGPKNSPTVPRLTPLSMLSPVHSPLSPPHRVHSTVSSHNMFFGSPLPSPVKEYGSPRSVPSSKSTSNTGGGHGHSFDFAQLNQMMHHFD

SEQ ID NO: 167278 - protein, 200 aa, Heterodera glycines
PLKLVDISNESARILRNFSPKLKRIPESPMVLSAISTSKSGSNSQSESFRTGLEEEEEERANGMEEVVNETPHLDMMETSGTGTEVENASNSKGKIEQRKSAIAPICSITLRQRSSAMKFAPSEMKRTHIATPAFFAPALPSVSICEAEGTPSFATASSIPSTPLSIDNVSVTASGRLKRAAAKKVRSYQEPSLSKKMRR

SEQ ID NO: 167279 - protein, 119 aa, Heterodera glycines
LRTNLINSVPTNDQILVPETLLKKRKSQEKARAERTDAIQKQKAANKEKRGVIFKRAEKYVKEYRDAEREKIRLHRVAKSEDSAYIPAEAKLIFVVRIKGINKMPPKPRKILQLLRLLQ

SEQ ID NO: 167280 - protein, 34 aa, Heterodera glycines
AVEGKGHNHGEDWGPSAVEMGVKRREWANGTIDG

SEQ ID NO: 167281 - protein, 65 aa, Heterodera glycines
MPFYDSLFGGSLGDDAPPASGSAKSTSGPLAQTAIGVAPTSIPAPVAVSSKKPVIPGMAITRTTF

SEQ ID NO: 167282 - protein, 237 aa, Heterodera glycines
KAQNKMSKRTVEQQRQQQNMQKKHNKLEQFRSKLDQIESELMEVSDQLKDQLARNDQFRKGKGEIEKMPIEREGENRLIKERIFVNAAKMEQNHAQLRQNQKEVNYEFAEIIKFFDIWLRESQTHFASSPFTPTTENHSLRRQQNLKASIWAIDLFELRQFRNGNSLAQCMECGKKFMTTEEAAMGWHIVQGHPQYAAQLLQKQLERDAQQRQGTNGTETTAQKRKRKATEEQEKPT

SEQ ID NO: 167283 - protein, 78 aa, Heterodera glycines
FFFFFFGLILFPYQAYWHPNKLLIDQYIQLYPQLKWFFMMWSKWTLVCFYVMGELWPMIVFTLLYWQLANQITTIEEA

SEQ ID NO: 167284 - protein, 177 aa, Heterodera glycines
RRNRLNFRLFIAFPLLSVRPSAGVSNASQFGKTVLEQNLSLFREKNGRNIWQFGDQFIFGAVDGMAKQTKLSKQQINAIKNSKVRRAKIKNFNFAFKARLCAHFEIGQHMDDLLNTTCDNCCGYFPFFVKTQCHGVRFRPFFVLLVFLLVLLFAFCTICQYLLAIVRLIRRRGRRIS

SEQ ID NO: 167285 - protein, 79 aa, Heterodera glycines
FNKVPKMISLAILVVFALYEAIAVPLYLRLIYVMLKDTHFAGSPLFRIVSMIGILEVCHFLVVLLFYRLPLFAPTAEFF

SEQ ID NO: 167286 - protein, 275 aa, Heterodera glycines
WDWGKECQGAFIKIKEILSSDLLLTHYDPKWEIIVAADASEHGIGAVISHRFPNGAIKAIEHASSSLTPAERNYSQIEKEGLALIFAVRKFHKMIYGRKFVLQTDHKPLLAIFGNKKGIRQMSANRLLRWSLMLLAYDFEIEYVNTTEFGQADALSRLIAKSTSPEEDRVIASMEFEKEAENFFINTLETVSLSSKDIISAGNEDETIKKVKKFVKDGWPNDKAIASETEEIKLFFRRKDDLSITKECLMYGERVVIPPKFRAKVLRMLHKGHPG

SEQ ID NO: 167287 - protein, 267 aa, Heterodera glycines
MVLQFSSEQKRLLGLGRVPSLRRGLLPRTSLSDQLYHCLKTFLTDPDSGWFLVHGLVGTGKSELVTKVLWERPELCFALVDRILWITDRRFHPAELSQLAADTLLLAVSLNSPTNFSQMDDGELSSVAHSLHSLLNDNFAKTLLIVDGVQMADSVKFFDQIKGKMCKILATSTSRTLFNGLENIQTFKIPSDNCSGEELAQMALNYGIKETFSAERINAILCETGGNFALLEKMFVMARGCPAIFDSLLAQLRHSPLSLVSCHSAYY

SEQ ID NO: 167288 - protein, 233 aa, Heterodera glycines
  unsure (1)..(233): unsure at all Xaa locations
MTAFEELGVLPELATALNDLEWTLPTDIQSEAIPAILGGGDVCMAAETGSGKTGAFCIPILQIVFETMLPSNPKRSGAVEDNGWRMNIFDRDHNLGIDASGFVCESNHPKLWSGSRSVRGVKGSGKYYYEATIESDGLCRMGWSTARANLNLGNXDQGWGFGRHGKKSHAGQFXDYGQSFTLGDTIRLFLELEMGRIPFAKIGLTSQWLLPKATPDSARLFPGRVIRKLVFAF

SEQ ID NO: 167289 - protein, 86 aa, Heterodera glycines
INKRHYLANNFTKNHPMWQKSISKSVLLSTKRNRTARNFPQVIHQFLANISGVEQKGLISGGPTITREFLERSKFEEMSVADDELQ

SEQ ID NO: 167290 - protein, 97 aa, Heterodera glycines
FFFFFFFLIHAVFTSKVNAFKQSIMLHRRHYCRLHTKLVWPSSSSSSSSSLAGCCASLLLHAAASCCCSTLSSSRRWALPPPSHSFGKFISAKKITS

SEQ ID NO: 167291 - protein, 118 aa, Heterodera glycines
RFRRTDQNYQDTVASMEPPILVPLAKSAAPSRYDLSSLKLIMTGAAPVGTDLLDKVRRRIPSLKQICQGYGMTEHSMCSHLSMIGSDDSNTACQLMPNLDMKGDDIESRMPLRCAQNW

SEQ ID NO: 167292 - protein, 74 aa, Heterodera glycines
MEHGMDAIKKRSPFRECNDPLGFMTHVALNADKKYHHPKWLNVYTDVDITLRSRDADGISKRDVGLASFVEDEV

SEQ ID NO: 167293 - protein, 160 aa, Heterodera glycines
TLLDELAKTLIRKSNGHLGTQIVINVRTVPLVILEILFVILQLVVVLVVIRTVEAVLRCVWHLASAVAAFSHTAHGPSNALTLRRILANWINVTDDSSGGTQIFHLRGGRRKVRRMGNRRNASSGVPSCRTDAFLLVVVLHRMFMLSLASLCMAIALLGF

SEQ ID NO: 167294 - protein, 129 aa, Heterodera glycines
SLSTPQEWHKTGAFLEGRCFVDTAQRQLIPLRDVNGNANVREVAVILLMDRHFTQRIGPSEKGPDRPTGINQMNIRHLKLAGIHPIVFTERHFRELGDDERSQIKFIREKILSLSEEFHTNEWTEENSS

SEQ ID NO: 167295 - protein, 68 aa, Heterodera glycines
FFFFFFFNSVYHSAGNKINSIPVKNQRSQILRNYSIPLSQAQNAIIRLAHEAYFSFCRESCRESTVSS

SEQ ID NO: 167296 - protein, 114 aa, Heterodera glycines
  unsure (1)..(114): unsure at all Xaa locations
NRHKKLKKEKVSVDFPLGGEATAXNNNIIADFVDLLNGAEEGNSHLLVVMGGDTKLDDVLLRSPIFAGSGAALGAGGEFGINEEDDPELAMALRISLEEQRLRQQQQQGGEGTD

SEQ ID NO: 167297 - protein, 184 aa, Heterodera glycines
ILLVERTKTRSDGDRFTDKILRMTSRTADAKLNPFLEFTRRIGNMYTPSVYAQLINVFLNTELSDKSNGKRILIFSYGSGCIAAMYSLRFNLCTEKLMAAYGAIKQSAKKAHARLDQRIRHSPKQFTAALERTEQIVAGGDTYIETPDDGKRSDGIPMFAGTFYLREIDSKHRRFYGQIDDANE

SEQ ID NO: 167298 - protein, 44 aa, Heterodera glycines
ISLKCHSLIYFVKLLSLYILLFFKHWIINCKNKLIKKQKKKKKK

SEQ ID NO: 167299 - protein, 143 aa, Heterodera glycines
PLCSPDGGGARIRSAVPSLWSEIDTNEPVEELVSLERKAMRRRSIRSGIASGEISRVSPFLNDIVHVNKLGHEEMMNSSKFSSAASVRSANVPRQRMRSRSAGRQSIARLIPASKPNVHIHKPAIPASRPNVQIHKPAPKEHI

SEQ ID NO: 167300 - protein, 122 aa, Heterodera glycines
EAMKGFRLKLGKVPSLPRWGHHSNPAQINCSHKHDQRDQNECQLRTASARPAVPRAILLRLMPEVLRLGLMAMELAADRRKALLRIVSRGRGGVGGGEMHTIEVNGVIPPFSNRVIGQLKGT

SEQ ID NO: 167301 - protein, 57 aa, Heterodera glycines
SLPSSSRFVTHDLERGNQFQRRVDLAFKLQLSNLKLEFGNQIHETFGLVLGKKKKKK

SEQ ID NO: 167302 - protein, 230 aa, Heterodera glycines
  unsure (1)..(230): unsure at all Xaa locations
PFLPSTQTIMQFSDXRAPTPEDRIVYVCGSFDLFHIGHLCFLEEARRLGDYLIVGIYSDQDVNSYKGQNYPIMTLHERVLSVLAYKPVSEVVIGAPLCVTKELIDRFRINFVVQGIRTEHHTATEEADCYEVPKHLGIFKTVDSGNEMTTERIIERIIKNRLEFEQRNRAKERKEIAAFKALQRMKMTDGNGTNEEEGNAKHLEEENNGKCDEKNGRREYQIVSINTENV

SEQ ID NO: 167303 - protein, 96 aa, Heterodera glycines
FFPFNNLETFVCLFCVCQGKFPIWYFFLGFFLISIRTNIICLFNSFSYGEVNRLNILNHFGKIHTPAFHFAYSRLLFDYWSLITSSDSNSSKYQNF

SEQ ID NO: 167304 - protein, 181 aa, Heterodera glycines
LLFVAHCSDPSKVPFSAMSFGLGRAESVTRLSAFEPRPNPSLVRCSSLIDVNRFSRDFDRFSPRSSRLSQNDSSALWSSRMYRPSFVMDNHWFDKFYYFSPIFKGTQPYKCHVASHRLTYPSSWHQPHDYWRRVQHFWYDSDNDYAPLHRRMFEPFYGESAYTQRFWHRYRSHLLNNDVYE

SEQ ID NO: 167305 - protein, 76 aa, Heterodera glycines
FQLYVRRVFITDDFQDMLPKYLAFIRGLVDSDDLPLNVSREMLQQHKLLKVIKKKLVRKVLDMLKKISPEKFDEFW

SEQ ID NO: 167306 - protein, 189 aa, Heterodera glycines
HDVERDQTVAENVLKLHRYRPQGESVGAVQVFGTAMEVRTTFDAEKGDSHGRMEVYENIREWTAVEEGQKILSTQFMRKYIHTARDVKPKLTDEASTFISERYAELRSTDLIKTDCERTMPFTARQLETMIRLSTAMAKARLSKTVGLEDAKSAYELLDFACFKEKPRERLEYEEKKNRKKMEEGKGNQ

SEQ ID NO: 167307 - protein, 191 aa, Heterodera glycines
MASIDDSSSEVNGSTNGNASVRSFALQTTVTSAKLNSGGFLSKAPDAYVEIIVDSKEDQAKKTSVKKKTNSPHWDESFTLNVTENSVIEFKIFCKAKVFDDSLLASKSFKMSNWLRKESNNGKFENTPVTVPLICRDAKTERESKSGELKLSLTGNFERSRRRSSGLRANSSTPSTAESAVVESAAGPSTS

SEQ ID NO: 167308 - protein, 201 aa, Heterodera glycines
FASALYKEKRWIDWSSRPRHRIGFGHGKETKKAENESDEDQIGDTKQKGAEFGLEARKRTGREMALSLRRHLRHNAERWRRARDPAELVREEPLPTLSLFPQLLISRRPFDISRRLKPMHRHPLLSLRRPILSEQQLSKRKLILNIQFASFIPKRFVNGGPSQIFLHFSTKRLWRWKWAERKRTRGRRATVWRWTCSTWKY

SEQ ID NO: 167309 - protein, 84 aa, Heterodera glycines
QKKRRKEALTELRFLHGPSLPSLTPSPPLSPTLSPSHFCRSICHPRPQFTCTYLSRKIGPKDNASGILGRLFAHFPTQLPSIWT

SEQ ID NO: 167310 - protein, 143 aa, Heterodera glycines
MGRPSFPLNGISLLFLLPIFAFPSAFGWHFGTLDRFDPNSVDNRRLYVLKKSESPQWEDLGWAWGKRSLPNSEKSAQSSANWDDLGWAWGKRSSAGGGGEAMRRAKAHGTDPILSVVANRVVRSMSKQSPDWHDLGWAWGRRK

SEQ ID NO: 167311 - protein, 51 aa, Heterodera glycines
NRSLLLKLSDFAQTMPFLVQNLSRRYSVSRYSNLLGAQMAALKWRRSVGWR

SEQ ID NO: 167312 - protein, 70 aa, Heterodera glycines
HGPYRKGTQNNEHGHLSSPTSAQPTTTVEQLQQQPRGNTGGKGTTFVEEDGQRHGNDEGQTIQCFIFSFF

SEQ ID NO: 167313 - protein, 86 aa, Heterodera glycines
LLSILSEKKFSGQGVATNANMLFGLAYFLCFSMHRSVFTNAYLLGSTHRKGADLFLFNILILILDYFCAPQLMLWREVETILSSQF

SEQ ID NO: 167314 - protein, 85 aa, Heterodera glycines
MMEGDAWLMSTVQAEDKLLQAHTNREKVFSILKTLRDRHLDFSGSATTKQLVKVLVLYECEKHYANHEWNDFCLGDRIIGILLQM

SEQ ID NO: 167315 - protein, 170 aa, Heterodera glycines
ILSAWGSFFAGSWQAAGHCLCKIHQILPTEPIFCATGGWFRWSTTNSPFGMPSFLHSDGTCAQFGCCAIKINTFRCTTAFCPILRATPMPWKLNCCAQNCQGVRPSNAMPSLSRQLAKCEKLRKICHAQQIQTRAPAAPSHTDRAERSKSCGTAEQMSRPFPKLGLSIGR

SEQ ID NO: 167316 - protein, 248 aa, Heterodera glycines
  unsure (1)..(248): unsure at all Xaa locations
MANGQTATFAMAIDLGSEFMKMALIKPGVPMETVLNRDSQRKTPMALTIRDGERFLGDAALKKLLVRPKNTFIFFLDLVGKQFDDPTVTAFRNEFPYLRLKAHPKRGTVQFETDVGDMSLECALAMLLWNARQDVDAYAEQPVRDVVITVPSYFGQMERAAVETAAKIADLNLLQLLGSGTAAGLNYGVFRHKEITEKPQTLLIYDVGSTKTLVTIGPFLLVNHSHEGGSSYPQVETLGXGYDRALGG

SEQ ID NO: 167317 - protein, 100 aa, Heterodera glycines
IQSPFMSPEQGRAKLRKLRVFWASNLVLRKKIVLRLRLRVLIVKRASSIPGPIFYESNKLTILGFYTITLFIHVRTNPIFLVSFECKKSKEAKIYKILSV

SEQ ID NO: 167318 - protein, 134 aa, Heterodera glycines
NQKPIKYLIVKVPWTDEKLHDRVRSTTIFICSYFRKLVNQGKADYLPVFLSQSARLYDEKVLRVDTALLNVSPPDKHGYCSLGVSVDMSSAAARNAKRVIASINKTHPRTFGDAEIHISQIDALVHPETPIYEL

SEQ ID NO: 167319 - protein, 184 aa, Heterodera glycines
PSYILRVKKELTLCVLLLERAWNDADQTHGQFVLRRLEGHAEIFEEEYEGGVPEELRDFFRSPMFLLSERAASTEEPLASEAARPSENERQRKAAVIACHYQVQIFFNDLIVCASDPVPLHWPSFCVPFARIFDLRVFERPEKIRIRLMERLSRMAKWQEIGEVFLPLLADHKTGTSADDNRKE

SEQ ID NO: 167320 - protein, 178 aa, Heterodera glycines
MERRRSGKVLRRSLFLGRAHLLLSLTISSVFVGLFLGFALRIFQLSPETVRLVNFPGEIFMQVLKMMILPLIFSSLVSALAQMDARESGQMSLLTVGYYVITTLFATVTGVLLVMAIHPGDPSIKQDLAYLEVQHTPISPLDTFLDVVRNMFPENVVQATLQRAQTKYFAPRRNAQQK

SEQ ID NO: 167321 - protein, 157 aa, Heterodera glycines
SGCLICSVDNIIAGLPVEATEQFGSLLLPYMMDLLICNTDQPFASLQCRDEIKRAIITSDGQLTPGYKYIDELRLEQRRSAHKSRVVAVSSKRVLLLGAGMVSDPLAKYYFSRSNVQLTVASDSSKDRQRLASLGSNNESGVGDGTREPEVIIRSFR

SEQ ID NO: 167322 - protein, 176 aa, Heterodera glycines
ISYKSPQFTAVNASTILTRNGISLIETQPQIKLYLFHDLFHLDQDPYKNIIHAEFLGELHSTDDFVWELRKKRQKYALFRPRLFVTFDSTTNRWVPTHFDDQESVPLPSTSQATETVVFRPQNKNSLSDGILGKPRLNYGADFGDGPKNFQPSNRENEKQKSFVAPVENRARTWAP

SEQ ID NO: 167323 - protein, 169 aa, Heterodera glycines
LSHTLFLVFDGIPYTGQKVLDGCIYAYNAFVSSMHWLFTKLANTVFFVWESVVNLCCSVVDQTGRTISFVRDSAVNVTRFTMEKIGSAIFFMWNNAAHLFQSGFEKIGNAIFFVWHNAAHLFRSGFEKIGSAIFFVCDNVAHLFQSGFAKIGNAFIFVRDNFTNLFWKT

SEQ ID NO: 167324 - protein, 256 aa, Heterodera glycines
MGAESESEGEESEWGTESDESSSASDLEPLEGKEMEELRRYFLKKDKTDRGKTKEKKEKAAQREKIALEKKKLEEADGQNEESWQKITYKHDVAKPLFDGQAEVTGDLVVKKLLELGANRGRRATNRKVYVRYLQELYKAADEHNLGVGLLAKVLTAIIAALFELNTRISDAMEFNSWMKTVETVDGLFSLLSEHPNVIISISTNEDEENILDQSKPFCFHGSVILMGKRLDDELTKIYQSTDCHRSEYLEKLRGE

SEQ ID NO: 167325 - protein, 191 aa, Heterodera glycines
  unsure (1)..(191): unsure at all Xaa locations
RRHRAAVMKEPRSRAXGVPPQHPICTLSLTLPDYIGPLPCISAQADMQRGDKQQPPDGGAPRVPSVSERYAEALHANLAEAYPNVPLELVAKRIGGDWARLARVLGLHPDDIRQIRKEFNAGGGQEPMAALKIWLWLKAIQQQKQQQEEANVSDDLEKALRQIGRDDIVHRMYGLDITGATAADIDDAWRT

SEQ ID NO: 167326 - protein, 112 aa, Heterodera glycines
VSNPSSNCGQVSPTRCCFGSIFALRRHQKTVLSPQMKRVRPPRRRPFPRRPALGCAPPPPPSSSPPCEAPTRPPPLQFLPVHFPHSACDERRRNWKLYNVPNDLIIYLTKYI

SEQ ID NO: 167327 - protein, 156 aa, Heterodera glycines
  unsure (1)..(156): unsure at all Xaa locations
PPHRLLRPPHINEKKLLXPAPNNMPPLVYEGLAQPMLGHMHTEIFEIMDDAKAGIKYIFQTDNALTFAVSGTGHAGMECAILNLLEPGQTILVXENRVRXLRTKNVADRLGIKVHRLDIPDGEVINLHDFAEADDNYRPQVAFACHGERSNGVVHP

SEQ ID NO: 167328 - protein, 165 aa, Heterodera glycines
DPVNLDELVEFDLAICYRNVLDLSTEDGHCSVLFTHPLVYGDRYGVAKLAVAVITHWLDHSPVASKLNFVGIACQSGDILQCYMDLMAELAQHGWADFVAAHSSALFSCLVDSFDTGNKFEPSGASKGAAASLEDPALRVHLVGDDPRRPRRGQPKQLVSYELGM

SEQ ID NO: 167329 - protein, 156 aa, Heterodera glycines
  unsure (1)..(156): unsure at all Xaa locations
VAALELDNGSGMCKADVAGDDAPPPRVPSIVGGPRHHGDMVRMGLRDSYAGDEAQSXRGILTLKYPIEHGIGTDCDCMDKIWLHTFYNXLRVTAEDHQELLTEDPLNPKANADKMTQIMFETFTTPAMYVSIHIVLALYAVGRSSGIGVDFGDGET

SEQ ID NO: 167330 - protein, 167 aa, Heterodera glycines
MVISFLYQNPSSYDAAEEITNMTWAQFDHHCVRNGDNQVNAQRECSQLKGTAINWKGTVQSVRIIDIDNPFETLLDYLPDSVAQALRCFYDTTEEEGGQKRDGLRYNRCSLTHHNHYTYLLEVSGPYGEKFQISVNKGQLLLAAAHSFGDTLSLLGEGDIVRFVAFF

SEQ ID NO: 167331 - protein, 91 aa, Heterodera glycines
  unsure (1)..(91): unsure at all Xaa locations
PPLFFFFPPPPGVFFFRGXTPSPFGEGGKLKPSPFPYFFFPPPPPFFSLSPGPRGRYFRPFPRPLFPAGVFFIFFFPPPPYFGTPPPPEAG

SEQ ID NO: 167332 - protein, 164 aa, Heterodera glycines
  unsure (1)..(164): unsure at all Xaa locations
VSFSVTLSTDRNSAEPXKAVRFRVRAAPDSFVGLLAVDQSVLLLKSGNDISKELVEQDVEEYDTTSDSGAHVWTGMRRRMIGGGRKRRSSWYPWWGVGGKDASTVFENAGLVGLTDFFLYKEPEPIRDWRFRPMYMHMRTDFAGGEERKLKEQPRSAGPAHAAS

SEQ ID NO: 167333 - protein, 140 aa, Heterodera glycines
DSLTETTIQADIYSFAFNALEMATTGALQSGCFNGAPPSSMASSASVAPPSAASFASLPLHATAVPLPSSDRDRGAVTENEPPNGTGCSLASAASTGTLQATVSNWPTATVSAVTSLPQSAVCSHVVTQEMVHKALNSLD

SEQ ID NO: 167334 - protein, 113 aa, Heterodera glycines
  unsure (1)..(113): unsure at all Xaa locations
ELDPYDDLDHFYCGMEDANSRNLDLVKEWXQTVLNVNMEKLFVIMLMALIFTARKDLKGALQLVINALSDFPTHYGLLELMLKVEVXYGRVEEVLQTYHNLVYFWRITHAPAE

SEQ ID NO: 167335 - protein, 149 aa, Heterodera glycines
QSSLGYNADLSLLPCYCKQRLMELFASHEQLHSEQCFGLMLRPMAGRNLTRLCFYLNDHLNDSSLEALVTFILNHPIISIVKCPRVTDTGIGTVTLRQNKLGCLELIGIPLLSSYATQAANSNRLTKRHLSGCPQIASEGNFYLAVNNP

SEQ ID NO: 167336 - protein, 213 aa, Heterodera glycines
RDQSVFDHYASDSNLAYHPRHLCPLTRSDSGGLSSEFGFGTSPDPIDIQPPELILDDNIRSRDSAFLSDSSPEQSSALARMSDERNYGPTAQMMNDSGIFLDFLPGSLSIDFPLLVSTEKLRTQNEEGKCSTDEGRAITVELQFKTPKAFTEEELRTIDVKRKEEDESREDEPFEVAEWKPLEEIEAEKAQIEEKNEEEVTRTQLGRNKAKRD

SEQ ID NO: 167337 - protein, 201 aa, Heterodera glycines
AFLDANFKNCTNFPESPADSQRVAFGFVREGICNSQLAAPSLCSFDGFDCRPNSSRKVSTTSLESGGSASSGGGIATLSRRALITTSRDETLGLSGKTGGVAGGAKNILISRQNLVNSSAASAAVARGIARRHGRLIEQQAEANNLVVAKSLSPRVQQQPLATVQSFSPTNVCRPPWTPQTEKRRLIGVKDFVSQNTFSKE

SEQ ID NO: 167338 - protein, 54 aa, Heterodera glycines; identical to SEQ ID NO: 157777

SEQ ID NO: 167339 - protein, 114 aa, Heterodera glycines
CANNRDGAHLTLLPLVWPTSRPHQLRSHLPGPASYLYIKIRGGLTTKRPGRKRISRVEHRDRYHSKELGLLYLSIQVEKLVICGKFREKRVRTKKTGLFTTGQKWVVKCVFSPY

SEQ ID NO: 167340 - protein, 197 aa, Heterodera glycines
  unsure (1)..(197): unsure at all Xaa locations
KERPSTRRRANWAVRSFWLVGLHQTLLNSPYIAHLHSPKTITLLCLRLTLGDPFGILDDQTVPPFTLSAQHSACAPAGAYLSSVHAPQTVLSAHSPPASFCNVVLRLTSFLMXYLGQLVFSLEMICGVESIGPLAERPEAILCQFLIPMFLRAAISGKEAPQFRPKDLNFCLSLLQNAISPPSLAKQSVAPAMSGSS

SEQ ID NO: 167341 - protein, 157 aa, Heterodera glycines
SREKIAKNVQKPYDFLHKFLSTTISVLLLILMDLLNSLGSSSAAAPLSSSSSIFTNPNSTLVVVVKQYQQQQQLNNHHHNHRNNHAAAAAAAVLLPFNNNNNLTDEITELAHATVRGDGDRHSDHFADGTIILFHGAAEWCPNVSNAVVWPSCITLG

SEQ ID NO: 167342 - protein, 233 aa, Heterodera glycines
  unsure (1)..(233): unsure at all Xaa locations
XNSFFLSVHDVGSTXPPFREFVNSTAMSSVQQHSVFLHVCVPGQNDGAPKLEGDFPSMDQMGESLVHVLNTLDVRNCIGIGEGAGADILCRFAMAWPNRVLGLILIHCLATPHGIIDSFKEMLLNLRLEDGNMNSAAWDYLFLHKFGMHEKMMKEAFIAELSSVINTHNLSRFLYAYNRRTNICEIIGKKLANTDVLLITGSRAPHNKNGRHMFENMRRDKSTLLVIDEVIDL

SEQ ID NO: 167343 - protein, 98 aa, Heterodera glycines
LGLLVSDSKKFSSLQLFNNGLQSFVLFRQFFILFLWHLVYFSPLVDTLKQKVVKQSTARERIRNGIFGTDEGHKFEQKFGRQAGGGHWQQRKRRQGPI

SEQ ID NO: 167344 - protein, 122 aa, Heterodera glycines
LTSETVLLSPAMAPKCLPLELLFEIVPFVHAEEAVPNVLLSCRLLHNLLLPCVVKWKKRMAEEKKEEDLTKQFAAMSKALTKRMEAVEEELKKSTEETKKSTFRMEAVEEELKKSTKRIEAV

SEQ ID NO: 167345 - protein, 132 aa, Heterodera glycines
  unsure (1)..(132): unsure at all Xaa locations
KTLVTDCGTQFMSSTFYIIGKNLXFEHQTTVPYHQSANGQVERYNRTIVDMLVTSTEGKNWAAALPLICFAYNSSINYQIGNSPFYVMHGFDPRLPSEVTLGKVEDNFSDMAIYVHELTKRMEEVKTTVKEN

SEQ ID NO: 167346 - protein, 64 aa, Heterodera glycines
FGVRLEVRSTFKVDEDDPLFGLLIWPVRDVAFTWNVKAKAHFAKLLAAFVSLLFVVLKSILFSI

SEQ ID NO: 167347 - protein, 216 aa, Heterodera glycines
LCPKSYHVNCFRLYSNSRHQLQDNLAVGTAFSSSKRQLVSQQIAPGSQRLLIIQSLEAETEYELTIEAENSVGKGDRVIIRQKTLVEPPEPPQIFLAQATANSLKLKWSDGGENNSSIGANGHGNYYYYLERENENGTYSPVYEGELRTARLKGLREQSVHHFRIRASVSKGLLLGPWSHRFSFQTTKLPPPAPKQAPIVAEQMQDHFQFEWNSVR

SEQ ID NO: 167348 - protein, 243 aa, Heterodera glycines
MSSIEIEAADVVQLVQQYLKENNLVRTLQTLQDETNITLNTVDSIDQFCQDITSGHWDTVLKCIQPLKLPAKKLIDLYEQIIVELFELRELGSARLILRQTDPMALLKQADPERYTQIENLLAKTYFDPREVYPEGGSKEKRRAAVAQSLSAEVHVVPPSRLLSLLAQALKWQQHQGLLPPGNQIDLFPGKAGIPKQEDEASPNTLEGNNQFGAKSHSRIGPFHPGGQYLVTGTVDGFIRSWK

SEQ ID NO: 167349 - protein, 116 aa, Heterodera glycines
ENNGMVVQQQKITKNFAPTTKLNDQQKVLTQKDDQRPPTLWTMSSLKQKFLKNKPIILTAFQQQQKSEQNPPVNPNYIQQNQYQSTKLFDQNQSQTTSPTLIQPIQYQPAVQKQLQ

SEQ ID NO: 167350 - protein, 61 aa, Heterodera glycines
NLSREFLRTLIYKQFVHFCEIYTQFKNVDGCFLAKNSFILSLFLCLCFLNNSMEKLKISMG

SEQ ID NO: 167351 - protein, 93 aa, Heterodera glycines
GRCLCPNTHRGTQCQFFIRDPNCRDVADFPTELTADWQPQVLRPKVKCTGKPPCTCHWRIKPVDGQKVAVKMLRLEAAAFECERPCGKLNVEF

SEQ ID NO: 167352 - protein, 99 aa, Heterodera glycines
IFPKNFCMTKTNAGPLCGQVVVNSELFPLCHTRFGSSCGDHPLISVITVLLCYMMSKTTCLFFCLPFLFLLSHFSHQIFSKFVLKYSFTHIFNSLISIW

SEQ ID NO: 167353 - protein, 160 aa, Heterodera glycines
KNRFDTPGCEILYFDTACIIYVHPEDNDPLPTGKGHLGELTDEKPDHNILEFISAGCKNYGLKLERKDNGQIEYDLKIRGITLDEQTVQTIHYDSVKDQIMRYGSDDPADPIIVTYPHFIRPNLIQGKVYTQSLTKHYQPVFTKGIINDSFQVLEFGYRK

SEQ ID NO: 167354 - protein, 156 aa, Heterodera glycines
ILKISCCVHFTDCLSFKMSDAETSIAELPVPKLNGSNSATSGSDGEVPSSSASKVMPPNTHSQPPQQHHHVTPSQPMPVPISYAASAADFSTMVGTPEFIQDLLYTPTGSANGGFSAPAAVFGSTPTNNYGFGSFGSVYPPPSLAANRPLSHHQHN

SEQ ID NO: 167355 - protein, 114 aa, Heterodera glycines
QTLPIFCSLPVNDQMILLKRFAMPCNVLEYGYFTAQIGLDDVWLISNGTCMPRSVNTLVTEDRKWRQENLYRQMTDRCIDEVSTPLRKLQLKPEELVTLKILLLCSCGNHDQNG

SEQ ID NO: 167356 - protein, 109 aa, Heterodera glycines
HFSPYPLDTTSSISPAVLRESFDLLKQQENVHDVMADRILRHGNVEVAVVQTALASLKRTISSSSSLSSSSSPLPDNSPSKKRKLLSTSVPNGLSEVDRGTVMLIYYYL

SEQ ID NO: 167357 - protein, 112 aa, Heterodera glycines
LNIILFAKTRSQWVQMSAIREGEKAASDVGMRALIKNCRDRSSICWKNSRQSISIAFVLALSSFLGIHCGSSTHGWNKTYNRTIIYKILFIIFFHSFCNTKPTLCWSSPLAF

SEQ ID NO: 167358 - protein, 209 aa, Heterodera glycines
  unsure (1)..(209): unsure at all Xaa locations
TPTIVNNVSLDPQVSANFLHTAIEEKREDEIIHLLCTISNQQRQELAREFEQVFGEDVSAKLKKALSGDFEELILALLEPPAVDDAQNMHRAMSGLGTRESVLIEILVTHRKRQIDEMMRVDQQLYGHSLEKDIGEDTRGPFQRMRGALWNDSRDERWSSDPIKANMTARALVKXNQVESGGNESLFNQWWGTKFHSVAFDFEEIPRAA

SEQ ID NO: 167359 - protein, 138 aa, Heterodera glycines
MTISTNVSQFALPKCPQLVRLSDDRPIPRLRRRFLPFFLSDHFRFIVLALAMLCMTSISANSLLFNFTDICMDGDANFTANQNGLLIAGTAIGGILAIGPVPHAIALFGLRYVFALFGLLSGLVTLLMPVLFYIQGGF

SEQ ID NO: 167360 - protein, 116 aa, Heterodera glycines
FPFITLLRSLLLLFLFLIFLLPRFFRFRFAPSSPLFCLFYLPLLSPLLFRVPSSAPLFPLFRVPSFLLPLPPLHLPPPRSLPIPPSLRSPSSSSPPRPSPSLALWPLLPLPLAFSI

SEQ ID NO: 167361 - protein, 91 aa, Heterodera glycines; identical to SEQ ID NO: 141019

SEQ ID NO: 167362 - protein, 122 aa, Heterodera glycines
  unsure (1)..(122): unsure at all Xaa locations
DAVFTKMQVMMIDNDNDIYPWDTSEELCGPTLERVERVXEELRDSPNIVMATDNNLDDAHEDLTAANNLLEEKDKTVLDADAELAALNRPMVLVQEEMHKLAERLKLATENMEEATDHCHES

SEQ ID NO: 167363 - protein, 94 aa, Heterodera glycines
LGRTAQINMRKSFLQHIPELSSHIAMSVPARNYPKMCSLAQGSSGTLSHNGKGVAMHRCPSDDCAGKDPPQRGSQKGNLRSVRWTPSEEKAVFE

SEQ ID NO: 167364 - protein, 71 aa, Heterodera glycines
AHGHGSDQRNQQHHQEAERRHFCFLRDLLVFVFGDPFYGMIFFVGSAHFYSKKKKKKFQPVREMVLRRLIN

SEQ ID NO: 167365 - protein, 228 aa, Heterodera glycines
MQSAAVHFSATVDGEIPDAPLAQVDELEMVEGSFAAFSSSLTDISAGDCEKSQSDEGPGEDLSNCSVNLSSSLQDLVESFDDKVAVVLKDFEKDAEKIAPIKIRSQEEIMSESQFWWTLTGNYGNLPPIDFDNSQIRRKQLEALNFNSPKVISPVFTLINCFLFFFVLSRERRPIEVSSPTATRRRTPNESTFTDSQLRKHTTKTANPFPLTPTKSSRKLMRFYRPAI

SEQ ID NO: 167366 - protein, 241 aa, Heterodera glycines
LNLSPQFRHQIPLLFFLLLTFFASANGTSKCVWVRGALQCHRDPSKHQNVEVRVIDRDGWGPLKVLDPDDMMGVSFTEQDGTFQLDGCGNDMNFLPGVPNLPDPFVRILHFCNSEEGETIELPEFRIFVPDTYDLGILVLDQKTLPNSTVNFPVPENPRRRLQQAKRPTEVGTLDESNGKKGAEDGFVTVDAPKSHNAKGLDDLLPPGKTVTKTNGDLLWETQSVEMEEVPAEYDTSIRQS

SEQ ID NO: 167367 - protein, 202 aa, Heterodera glycines
SFWLISIFCTTNFKLRADIDRHPRQHRRAVRLLLRRLQAVTISNSSKRRGEATERWDGIWATNSAEAVPMKGTAAEEEEHFRRVVCFPQNVFVSLILHFFVPMPCNCQPIPPPPPFDVPPPPDPSFVFHLLSDDPPEAFEKLHLLHSCPLQKQLFFFRYPFGRFLPFATVAAFLLLTSFSVTAFVFWRKRRRTRRMEEREEE

SEQ ID NO: 167368 - protein, 115 aa, Heterodera glycines
TKTRSQPDTTNELDLIQERIKKTVELIPPINNYMEQYQANDKQMMKYPDQSALPDHEGSEPPLHGNATGEYTLPFMPDYYDELETVREYVDEETLLPPTMGEICWNVDLDALAKD

SEQ ID NO: 167369 - protein, 47 aa, Heterodera glycines
MEKEDEDDYIVVVKRCQIGATVRWEDKKTNNFSNINFWPLNGKYCIG

SEQ ID NO: 167370 - protein, 52 aa, Heterodera glycines
SSSRALQAYCCFFSISSLNGVITTFVICFAFNKPIIKIIIGTQIQSYSDFFS

SEQ ID NO: 167371 - protein, 199 aa, Heterodera glycines
MFSDATTALQSQIESFSSVASAFRRQFSTSSTSANQSIIPNTGASRADAFAAIRAAIERSENIIPSLPIDVIIGSSPVNEGRNHRWRQALLDEFNAFIPPSMGSQSDGRQRSNEEGNCGRAARTMANKTAIQPGGWNDDFVLRRQFGALIPAFDPRPGRTNVNQTQDVKLPDSIQFCTYRRKGSLIREEPKGGGTSSTA

SEQ ID NO: 167372 - protein, 189 aa, Heterodera glycines
ACQKSFRSHDAEAIAAFKGAARALLTRHRRIWFDKMCLLVQRQFRLFAKFTTAQRTQKIVAHQCPKKRRGSTDREATNHLQQKHCSLLPSMSSLCRAPPVRHSQPSPAEEKRMPKSEVQMPKYVGDVPRGRTLAVAVVVRIGPQHSRVRCPCSAAAQCWHCRRRCRRDMRHQWAFPADDDGRVRRPTVR

SEQ ID NO: 167373 - protein, 175 aa, Heterodera glycines
  unsure (1)..(175): unsure at all Xaa locations
LAYCMPSSMPDTXGSPSLPLVAVKTQKPMGQIKVDYLLATSVDWEEEEEEKHATRMETTFVKHWKKRRTLEVGHRGSGESFTKFATARENTIFSLNNAAQRGADFVEFDVQLSRDRSVVVFHDFHVLVSVATRNAQLLGHPSAEETKNATAKPGSKSETKLSERTEAATDGGELH

SEQ ID NO: 167374 - protein, 259 aa, Heterodera glycines
MNIPTSIEMGVFPFVQQTDLCDSEEIVETSAFGSVKVNIFGNSERYPIVTFHDIGLNAIANFENFFQFQTFSKLTEQFCVYNINAPGQELDARKLPENFHYPTMDGLANIVGDVVSHFGFKSFIGIGVGAGANVLLRFAMSHQNLLDALLLINATSQKAGWVEWAYQRWNVNSLRSERMTRFTVDYLMWHHFGKYFEECNPDIVQQYRDYFYSHPNPSNLALYIETFLNRNELSLRDPKSTSDFLLKVPVLQIVGINSA

SEQ ID NO: 167375 - protein, 66 aa, Heterodera glycines
  unsure (1)..(66): unsure at all Xaa locations
VAEVLKQSQEKKRNFRETIEFAIALKNYDPTEXQRFSGTVRLKHIPSSENKGWLLGDPKLWDEGNA

SEQ ID NO: 167376 - protein, 174 aa, Heterodera glycines
INGYASNKLSVRFVFSSLGRRTNGPTTWRTNQCQPLYFTYLCINEYLTQINVLFPRFTFSMYCFASSFSIPLNFAHRFLICAHASSSSSAVLGAFFFSSRQTWSPLSMRSAPAYNSTMAPPSLVIALISLSNKSLGNRAGKNCFAKTRKDNSFNTSKMFREPISDKLCHIFGLN

SEQ ID NO: 167377 - protein, 195 aa, Heterodera glycines
MNTPTAASSRTPTNVLATPFIPSSQMSMTDVRTPTTTLHGVIPSHHPPPIGGHSAAPIMTAERMALPPGIFSEGRGAFCPAPGNELGVRTEDQILQSKVENILREWISICYTPMAQKDPQHALAYIVQMVLLHVFEKDTIFWENIFLKNSSNCKLVNFLKFFGARDELLPYFRHLFFVWIVDFSKLFRCTTMKGS

SEQ ID NO: 167378 - protein, 140 aa, Heterodera glycines
FTYFQFSSEWALRLSADINMLPGKFPSALQPRFFDLCEQLTKQIVPTLEPFLRELIAVDQRSIALRVHIDGEVISYETEKWVALPEQHFGWTVTLDEQLIPFLYGLCSWLPSVFFVELHTFIVSTRPLPALTVPDSPGDS

SEQ ID NO: 167379 - protein, 181 aa, Heterodera glycines
PTLANDLRGLLAFVHPYAHLYETLNVEFLSARVFERIDAEWLSFLCRLDSAQLNMVPVEFEQYPDCPASLKHFFASARRFSLLDKYSTPFVDQQQHNNKYSSPEQLRKVKRKKAHELGAFGELLRAECAPLGIDRVVDIGCGLGHLGRVLRLNNESLQLQQTSNDNNSSLQLDYVGIEANP

SEQ ID NO: 167380 - protein, 95 aa, Heterodera glycines
MMLNRQILFTATAWFCWSLTQCMRVVPARGSFRQQSDRAVVQLVGDKPNGSQKMLSSTERAPRNSSGRILGCVFRLPKRERSGERCHSEDARGNG

SEQ ID NO: 167381 - protein, 144 aa, Heterodera glycines
LKNCYTSFHGARGPEAANVTGPDGVPVQGSKYAADLSQRRRFAGPRRNYFFRGNRNRRPRHSEEAAGGEVPVGEKKEGAENNGKEAKKEEVAKDANGGRGGGQRRGRGVRFRGRRNNRRNVAGSTSGGTENEGEQKKEQTQPEE

SEQ ID NO: 167382 - protein, 88 aa, Heterodera glycines
  unsure (1)..(88): unsure at all Xaa locations
KEREGETEAERRRCRWQERERERXRXRRLKGRRRREXRERKERLKGRGRRERERMERRLKGRXEERERERKERLKGRGRRERERVRDP

SEQ ID NO: 167383 - protein, 252 aa, Heterodera glycines
  unsure (1)..(252): unsure at all Xaa locations
KSREELINFVYPNFQQLLGNERXLLSRXILAANIHTCDEINEMMMANVPGQVREYLSTDKPLDDRPLDIDEIESEVAALNRRTDSGMPPHCLQLKVGSVLVLLINKSDREVLINGTRIVLEELGDDRLVGRVINXSNAIGGQVRFFLERSHNIFEDKTPGGLKYARLQFPIKPAFAMTIQKGQGQTIRTVGIDLEREVFTHGQLYTAFSRATDGNNVRVHAPKREIDAQGQAKVLYIVAKKMLILRKRAIQA

SEQ ID NO: 167384 - protein, 143 aa, Heterodera glycines
QLFAGKMPFKRYVEIARVALINYGPEFGKLVVITDVIDQNRALVDFPEQERRVVNFKRLAITDFKVDIKRHAVKKDLKKALADADVVAKFAASSWGQKLAKQAAKAATTDFDRYKATVAKAKKARAVRKVLNGLKKTAAPKKK

SEQ ID NO: 167385 - protein, 201 aa, Heterodera glycines
KVRKRVLAFFDDGSQKTYIEEELARSLKLTVIGRQKLELSGLGGVNLGKFESPVVEFGLKARDFNMLMIGRAIKKVLKEIPVLDYQEINNHELKKNKISVPYLLDEPKITIGSDFYNYFDIRPIKHLNSGFWISNSKIGKILSGDGKVTWANFYDKKVNTKDEYNVSAINSSAIQCETEITDQMELDKNKELIKLVRQHDS

SEQ ID NO: 167386 - protein, 102 aa, Heterodera glycines
AHNFCPIAGKSVGKLSKKAMQKRGKSKNGKPNHRNHRQNEAMECHFRWKVMDKSDNFRINIKYSVQIILFIFRPIIWEKCWQMNGIDTIFVHQKIKIIIQKR

SEQ ID NO: 167387 - protein, 164 aa, Heterodera glycines
NAKIICRDLKPANLMFSDPQTLQLIDFGSATECPLRILDARDSRRILDEAAELCTMPYRAPELFTCEIGAMIGESVDIWSLGCVLFALCYFRSPFDGVHERGDSVALAVQSAKINFDTAVPVDRHIAELIQSMVLIRPSERPHISQIKKRVDQMQTLDEVKDNE

SEQ ID NO: 167388 - protein, 265 aa, Heterodera glycines
KVLGLIWDIDKDDIVFEFPSVDSLKIVNRRLVLSFLASLFDPLGLMGPCIQPLKLFFQSLWEEKKGWDDALSEEDSTRWNAFQESWKDKRIRVPRRTMIQGECSLQLHAFVDASIHTFATAIYLRVESSNKIQNWLIFSKNRLKPKSASKALTIPRMELMAILIGIRGLKFIQTQLRRAIEHSYLWSDSQIALNWVASKEAQPKFIERRIKEIRTITKCSFHFVRTAENPADLATRGATPEELSTHSSWWGGPNWLRKGPKSLAS

SEQ ID NO: 167389 - protein, 98 aa, Heterodera glycines
IYAFSFKKFKFLAALGTIISAINSEQAMRLPLEFGTDSPAPSTLKLNKKIHLQHGRTKSFGHHIFQFRRHSQIEGYAGKLKDLKILMIQLSMSRNEFY

SEQ ID NO: 167390 - protein, 261 aa, Heterodera glycines
  unsure (1)..(261): unsure at all Xaa locations
MASVPTXLDEKTKRNEELATAILKKMPKPNRLIVDQSPKDDNSSVLMAQTKMDDLGLFRGDSILLKGKKRRETTSIVIASDTCPPEKILMNRVVRQNLRVKLGDVVSVSSASNTPNGLRIHVLPIDDTVEGLTGNLFEVFLKPYFLEAYRPVYKGDTFTVNAAMRTVEFKVIETDPAPACIVVPTTIIHCEGEPIKREDEENNLNDVGYDDIGGMRKQLAQIKEMVELPLRHPMLFKSIGIKPPRGMLLFGPPGTGKTLVA

SEQ ID NO: 167391 - protein, 100 aa, Heterodera glycines
VTHYIRPFEVLDLSANSQIPPALCGQSDILFGNIRELLDFHRSLLLPALQRSSNSSMGFLLCSMPSGSFAFAYRAYGATTDQGSVEEENSIDTPIFPECH

SEQ ID NO: 167392 - protein, 150 aa, Heterodera glycines
  unsure (1)..(150): unsure at all Xaa locations
VWKHTPVAIKRILGKCGSDERQQRERIRQSLQELKTLAKFRHDNVLSLYGYSLDGPEPCLVYQFMSNGTLEDRLLCRVTYNGNHXNGTEPLGWAKKLSICGGVCRGLHFLHTINQMPIIHGDVKSANILLDKHFEPKLGDFGLSRYGQVE

SEQ ID NO: 167393 - protein, 206 aa, Heterodera glycines
  unsure (1)..(206): unsure at all Xaa locations
AECALRCFAAMTDRFVRRQMDPMALASPSRLVAHLFDLIGSSSTAHENAPTELSSNGENCRIRKRSSAFISMVFSLFVNLCKSSFALTEEILSSSKLVPALKMVLNGKDERCINDSLRFIDLLIVLLCEGRSAISKNRVLLNDSVAPPAFDKTHRNLIDAIRLRDTDALIDAVENGTVDPNFVDDVGQTLLNXSSAFGTSDMVIYL

SEQ ID NO: 167394 - protein, 232 aa, Heterodera glycines
MSSTISENQQQSWGSFVKTSFGTRRHCWVCNDVWMDILPLFDHAQLGLKLALISPRFDVLVDAHFNGKSELTIWRQITIQRFKGPKAKLSEWIDDKWVAFPLPDRPLPNKIRFRNLRIENPDHSVLAFLRANQQIFEKATNLCLSVSSCFHDCLFSFVDNNVQPIWDVFACEIWPIFAPNIRRFNFRDGDHLDNLRRRISPTILTDLNNLSAITSGRLFPDGIADDGPNATA

SEQ ID NO: 167395 - protein, 104 aa, Heterodera glycines
KRSNFTALWSKKNPNKLNIFKRKNKQQINRSANRREGPPLPFTPGAPLYKPGNSFPGSSVATISYIIFNSPSIDLVPLLQPRESSTRGLRPGMDKRGSVGPAQL

SEQ ID NO: 167396 - protein, 140 aa, Heterodera glycines
TCHCHFAHGGQHFSQYSLKLPTWLESRYKRVHFADLLRLLIDYDDLSDAFRLLHSHIDSARQRLREFVARWIRTNPKATFIPDEELAPLLPYTHINELLRLAEKRTDRQQLPIKETVDKLRQFADFQKSVTKNPMPFLAK

SEQ ID NO: 167397 - protein, 230 aa, Heterodera glycines
  unsure (1)..(230): unsure at all Xaa locations
MAIKYLEWRSKRDGIEIRHAGNGREVKVGKYKLDGFLLXNVGGRDKCIEVMGCYIHGCMNCYDPAAELIGGRTAQELNDETQERLAELRKTLDVEEVWVSLFDIYIFIVNFXGCQIEKELKKDEEMRDFFDDRGNEKGPIDPRMAYAGGRTGPMKLYAKSDEKKKISVYDIVSLYPSVNYGTAYPIGLPEIIIPKTDEINVNWMRPEDLKYKGLYKVRVTPRKGLRIPVL

SEQ ID NO: 167398 - protein, 270 aa, Heterodera glycines
MFSLCCWLRFSLLPPLVFGPALASGGGPNSSQRHPSHHQQQQQQLLHSEPLQLLHSSAEAHPTVVNMSSTNGRRAADAATLGKSGPEGPPPGKWLGCEDAPDEWRRRTCIKLRQIDRKARQALTRRVKQMVSPPSMPGSPAWLKPLPVPVNHRGQIASHPFECMTLRCLCPFFKGKMRRDGLCYLPSGKPLSMAYRKEYRMLSDEERRRFHVAMNELKRQGIYRFFGTQHRRVATGGAHSGPAFLPWHREFVKRLEIALRLLDPSLAVPY

SEQ ID NO: 167399 - protein, 55 aa, Heterodera glycines
LTIACPYISGRFGRLCLLGRFFGRHFVVVSRTARLGHRRRYGLGHRNGLKKKKKK

SEQ ID NO: 167400 - protein, 163 aa, Heterodera glycines
LTLLQPRTVPSPSASLSPTDQKGWGTLKNSSDPSTINVPIKTSVCTETVKTANVCGREIGTVGHRHQLQQSQSKWRQAAELNVGDSSNLASPPLTSVELGTAQRRVGTALRPLEVSRPCRSVASNTSPPSPCRTPPVARPLAQRSIAAFYPFKRRALIDYQSP

SEQ ID NO: 167401 - protein, 213 aa, Heterodera glycines
PTQCPTPLFNQAQGSRKQTIWLYKPNAFQYEVEAWACRKVRKNIQKHTSLTNIPIIEKLDSELLSMDREECQQMINHQKCSFGTLKQEGELFHTDNKIDMSPRVWLFGSFSWMKASSENCYLFKTRIINKFGSPSIQTSIGDSDHCSFEKGQCFLEDKTLLLWNSSISKKCEYLPLGPFKGQMLGTIFIADNEKVLLTFEEKPKIVKEGVQIN

SEQ ID NO: 167402 - protein, 51 aa, Heterodera glycines; identical to SEQ ID NO: 132561

SEQ ID NO: 167403 - protein, 257 aa, Heterodera glycines
KAKRQSPFDRNVVEWKIEELGQYESEFERLDSDRDGFVEGGDVRDVFLRSGLHQNVLARIWAHIDVSKTGKLDLEQYAKCVELIRECQAEQNNATISAEFQSEEAIVGAGTPSSPSLPGHPSNLTRRDSQISNATNNSSTGGAKGALSEATQRVMELNTEIEQIQQRRRQAEQDLFQAEADMKVKNSEIRNLEIELLTLNATVKQLKNQRVEANKRLNDLDTKIVRLEGTAVENKKRMEEDQERLTKTQMDIQKAKD

SEQ ID NO: 167404 - protein, 87 aa, Heterodera glycines
NFRADHYGFFSQILNSCTNTDAARFLKRVKSAAGIEYLGYPFYLVDSLQSQTNQIVKALQSDFGSSRLMLNGSAFSVCGGKKAPKGL

SEQ ID NO: 167405 - protein, 42 aa, Heterodera glycines; identical to SEQ ID NO: 147096

SEQ ID NO: 167406 - protein, 182 aa, Heterodera glycines
PAIRKSAICESDQLSTGASESRLEVAKNFLRRFYNHSTLRLTGRRRRRGNGTKRGDADKGTAEPPLMYSSALGPFFEMRNPQPAEMPFLPYNIHYTIESTDEASGASDDDADGTAAAVRRPLRAVSPQSVWSCSPTCSSATITSPNRAEMTTTTSTRSQNSSSCMAITANVTAKREMISNRK

SEQ ID NO: 167407 - protein, 254 aa, Heterodera glycines
KFDNRNQQSQYRPNKPPNDRRWNNRPVCNYCKKVGHVANACRTRLADFQNNQRPQSFNQRAKSDRWSTTPFASGANAVHQDQTLSLLHEIARTMNKLTVNTDQPGRRDDVNTIVTSTEQCHVKKVHIKDKSDISKSEPLQVSSWEKATLGPKIHPFIFIVAIFCTCGPVFSNTAMIPQGPMLCQTETQPTLWKLPEIPECPIPKVTVGHVPISQIRELYIPNAIEHNTKAWACRKIIKRARKFTSLSGVPITEA

SEQ ID NO: 167408 - protein, 84 aa, Heterodera glycines
RLLQCRWGNILMEGHETVFQQMDQPLQCYFINSSHNTYLTGLQVHGNATVEGYMSALLRGSLLVELDGFDGEHGEPQITHKRTF

SEQ ID NO: 167409 - protein, 266 aa, Heterodera glycines
  unsure (1)..(266): unsure at all Xaa locations
DAVDVHEMAHFDRERIXERVXHAKGGGAHGYFEVTNKDIANYSKAAMFSEVGKRTPLFIRFSSVGGEAGSADTARDPRGFAIKFYTEEGNWDLVGNNTPIFFIRDPFLFPNFIHTQIRNPVTHLKDPEMMWDFWTLRPEALHQVMFLFSDRGTPDGFRHMNGYGSHTFKLVDNAGSAVYCKFHIKTRQGIKNLTAEKALQLAAEDPDYAIRDLYNAIASGDFPQWDFFIQVMTFEEASRFRWNPFDLTKVWPHRDFPLLPVGRIVL

SEQ ID NO: 167410 - protein, 87 aa, Heterodera glycines
GTRTEFQTKFLFFNRTLGLLHHFPKFIQDPETRAVGKAVKRILVFEKVRKKYKYRLYCSGSICVSAFHSFDHSLFSIEFTFSSIFNT

SEQ ID NO: 167411 - protein, 183 aa, Heterodera glycines
SVRVRRHKMRLLPGPSSSSEEVDDSSTEGPPCHCPSSLHSPRVPSRRPLSRAVLWCRPRRRCFCLAICLTVVALVANFTLFFIILDILLALLRRKCADNGYGQQKTMGQSSQIGQNIVKQTLANANNGTENANDSRTNNTSELASVNRQFAIPSTPSSYLSPIGAIPSASSPIGAIPSASSPI

SEQ ID NO: 167412 - protein, 133 aa, Heterodera glycines
PLMTCFWKIFVEKIFSLKNHVHPPLVPNLKITFIFIKILKKVIKMPNKIYIIEQKTADFCSILFFQTIFSEPSYEFFSENSNFSRNSAILMKRYKCDLKRYNSDKRSIKVIRRGKKVIRRGTMVIRRGTKVIR

SEQ ID NO: 167413 - protein, 237 aa, Heterodera glycines
MIRGEVTKGYSTVSVAAKEAVAAAAANDRQQTAQTQAAAPDGPQDAFTLPNPQISASTSAIAQRKLRIYRTIKNRDGTESNRIETVSHPQLIEAYVRIRTTRDDNFIKVYAQMDDQYKEEKRKERRRQQQEGGRRPRKGGAAGEPKSVAQRQDNIAAAASFVKSVLEQQQQLQQQQQQKHQQPQSLPAAQLPHQVQAVQQQNPQQKDTPAALSVRAQLPIKPGPKPKKPQMEKKQRK

SEQ ID NO: 167414 - protein, 162 aa, Heterodera glycines
QAIEECEIPPNLVPFSYLRLSLHAIQRKEKTFVASFLNNIKDELKRNKELQDNKKLLEERLKQLNDSEVRRKYDKISKESAESTDIIKHHLKEFTDHMNAIVSNVKDSKLGKDAIHQLKVATETAERVAQQVGEMQAYKQVSYMAKEIDRLADVRMYKRPDE

SEQ ID NO: 167415 - protein, 79 aa, Heterodera glycines
GKVNVKYIIGQIQNMMLKHRISGSFLRIEFSYKKKQLDFLPFLFDFLVKKIIETEQLFFSSYFLPMFEGFYFLVYKILN

SEQ ID NO: 167416 - protein, 111 aa, Heterodera glycines
ATAVSEDPPPPPPLVPAGDAEEGFCAAAVAISAPCLLTPPPASAVPLCNCFFFFGSAPLSPSSSSAPIHPLFRLFGGRCSGAVGTTASAAGEATAADAAFNDAFLLRINGR

SEQ ID NO: 167417 - protein, 151 aa, Heterodera glycines
  unsure (1)..(151): unsure at all Xaa locations
NATGLLXRXXAAAFPLLAVIPFMLGLYFQMLVISPLRVAIFQSPLFFPWKEWAMGVVHFKIVCASVLMGPDWWLKTAFEQVQQRTCAGLSLFVFIIYADGIWNIRLRDLYTNLVFPIVNTLTFLIAFPYVLSNFLLFFVGKRFKFFSFPKF

SEQ ID NO: 167418 - protein, 220 aa, Heterodera glycines
  unsure (1)..(220): unsure at all Xaa locations
MGVASLCSIAAXLATLIVVPQLYQQINEVNSRVFDGVQAFRVNTDSAWTELMDVQISVTPPARPRENPFNSIFLRQKRGNGGLPPQCVCQLQQPQCPPGTPGPPGPPGPAGLPGGPGQPGGPGQPGQQPPPCPQASAGCPSCPAGPPGQPGGQGPPGPPGGDGQPGQPGQGGGQGPPGPPGPPGPGGNPGQPGGPGQPGQPGAPGTKSSSVPGPPGPPGQ

SEQ ID NO: 167419 - protein, 84 aa, Heterodera glycines
QLMSLFGFFFKQFSVIAHQLLGVQQRRHLHPMQLFTGSLNLFLFFFSISSLNGVITIFHNSFAFNRHILKILISMVVQAYYYFF

SEQ ID NO: 167420 - protein, 127 aa, Heterodera glycines; identical to SEQ ID NO: 125714

SEQ ID NO: 167421 - protein, 221 aa, Heterodera glycines
MGECSSNNDVPNASKKWPCAYCTYLNWEASLKCVICCQPRNRPMIIEELGAIEEFGSKLVLSDRFVKESAPRWSCPTCTYLNCQRTKRCAICGSTERPARFEEETSPTENHPNRKDKTMATILSKDLLNKWSCSVCTFDNWPTAPKCTICGRLRSGGSANESEVRQIQQQKQQKAQQLNIGRTGRQRSFALSANGRKQQQHKDDADDEQHHHHKHSDQDDE

SEQ ID NO: 167422 - protein, 136 aa, Heterodera glycines
VQVQIKLKKFPFDLKLKKNFSAIWADSDLIGDTLSAVPVTKIFLNTQKNAINFQRTRPAMKTHMPAQFIAQFPWCDLFIFCWLSNLKFGFVQLTTHDGTFFCIGAAIRLKIIFFLHILKLMPWFFFSKFWGKNRGA

SEQ ID NO: 167423 - protein, 180 aa, Heterodera glycines
KKVGQIPFDIGELAAQVDNVQDDHALLQNQVANLNNQVVNLNNQVVNLNNHVGALLNLATQQQGQISQLQEALQQLVGPAIGQAAAGSQQQEEKSGKEKPKEGEDEDEAGGEITVAEDKEEAEGEKNVPEDEEEAEGEKTVAEGEGEDEEEAGGEKTVAEGEDEGTSDGEPKTKHPRLQF

SEQ ID NO: 167424 - protein, 109 aa, Heterodera glycines
IVLDKQQKVETTRHFQNASLGHVFELFNAMTSDSLQFVFISVLRCGLLRQRETICHLEKLCLVQRSFGHHFSPGTFKVRQNALRPRPRCAVRLDLIASSDCGRTWHCAS

SEQ ID NO: 167425 - protein, 126 aa, Heterodera glycines
FSDFEMPNSINRLFRRLRESHGDGGKKPKKASVVSGCCSRRTSSTISQPSNRKVGLTGITLPFLIFHNFLPRRCPSPSNANAISMVRFCPRRSFFAFSTALTVLSNFFRCDLPTKIVLTLSAQKSA

SEQ ID NO: 167426 - protein, 198 aa, Heterodera glycines
KLCEGNEWEKGVRFSEFLHLSRISKHFLSFIFSLPHCFFLSFFPISHFVLLRFVSACSTLTHNGALLQKVIPEADRQEWAPSNTYRGIFQFCFWRFGRWVDVIIDDLLPTKNGQLLFARSKTPNEFWSALLEKAFAKLYGCYETLVGGQLADALIELSGGVAETLNVRKFLHIHKQQIQQQQQPMFSASFNACGITVL

SEQ ID NO: 167427 - protein, 96 aa, Heterodera glycines
PSQIGISSSFSSDTPIRPITVRLCCLILRHVLLSLGSDQNFHSAVELAVRRSQHKLLNVLRGALQTEKFFLEMFEDEHWHFQVAKINLCILPKLHF

SEQ ID NO: 167428 - protein, 148 aa, Heterodera glycines
VPCSRCRPTPTTKSLPKCAVSLLSVQRAVRRWHRKLWCLSPKSAKWRSPLSAAQSSAAPPPFSNCAYASNANGGRDGERQWGEERTEEKGTEEKAKGGGGRRIRGSGGGAAVAGRGGGGRGGRPRHDGTYHGTVPAGDRSAPIHQSLR

SEQ ID NO: 167429 - protein, 142 aa, Heterodera glycines
LTLPRSQSEYSPMSKQSDIHQLIDSQMKFAKNTIDALNKLQDSFTLDQKPILSHLISTLSTQFDLLNSSIVHLRSADPTQKDVPISAEELERQRSVVIIGLPEHNDISPSKRGEMDRSKINCLFDSLGIECGTISYRMGRPY

SEQ ID NO: 167430 - protein, 154 aa, Heterodera glycines
MDVYASYVPQQNGMKQQPQQNAHYATSTPPSVDSPSAAPTTKFVAMPLLQQTARVFVGPGQQKEAQLIGLGLRKLRTYEKEDLERAKRYAMDQSVKYVMLKQREAHQQQVMCDRTMSPTKTDNEWAFVGIVFWELSRSTVVTWHYPSDRCPNGK

SEQ ID NO: 167431 - protein, 142 aa, Heterodera glycines
SIPSNSNPFSVVVFIVVGVLLTAFLCCRQLVTPLPPDNRCSFPTNSRPISGKKNSQKSWDKLKVPFQWNCKLLIVISQVFFAVPFCPPERCFSVKCEKRSDPRAIPRHWHNSDERKRNAEVSVQNGENEPYFWPMFWDKTSF

SEQ ID NO: 167432 - protein, 101 aa, Heterodera glycines
GGSLTSSVERRREWTKGGGRERERRKKGRDNTERERERDIATVIKRRERERMRGELVRERGESEREKERLSDSDKVERAREKARDRATALWVRASVRQNCS

SEQ ID NO: 167433 - protein, 116 aa, Heterodera glycines
GLHKPKMKSGHFRSVSCGPFLPNPFAMPFNTLRFFFAREIKKATAQHQQSKSVQKFHCNQTKIISGHHRNGDTMSDYTKLAAGITENDERLWKINDKKTKEQFKNILCCVWAMGFY

SEQ ID NO: 167434 - protein, 251 aa, Heterodera glycines
  unsure (1)..(251): unsure at all Xaa locations
RERSKTYKQDEVQIHCPXEYEASVDKEGNVSNQRARVRLFCLAFLSGTSFLEIGLNDRRREGKEVVRRKDILPMYTERWIRFEAPELHETVDKVVWEEDQVLRINPPDGCFFEVMRFRVRPPRNRDRPLNVRCLMRMAGSHIELRIDAMAVAHQQRARGTAASTRAVPCEDIVVRFPLPEAWIYLFREQRPWGVGSVHSKQRKPGKVKNLRDKLMGTVQHNEPSLIEVGIGEAKYEHLYRSLVWRIPRLPE

SEQ ID NO: 167435 - protein, 225 aa, Heterodera glycines
SGAYGCERNAGTLRVMGTVAQFRDRDNCPVAESIDRLFVVALRSVGMESLLSAVPLNVDVDAPVLPRDFRRSWLPPILARHAQGDSLDFFARSLFPLAERLHQRLHQLPELPQKLYTTLEHQIWAILPRLMANAPRDFHVAMPTLAPIMGAALNDRPDLRLTILRALREALKFETQNDGICMMERYARNFLPILFGIYTASAANTDKAAQKGDENGDIGKGRRAD

SEQ ID NO: 167436 - protein, 76 aa, Heterodera glycines
ELKFNYFINEFIKKNIFILQSPEHHKLCNWGYMLHNERSMRLSSKTDIWAFGIIAYETAEFGLNFGPKLEGGEEGK

SEQ ID NO: 167437 - protein, 161 aa, Heterodera glycines
ILQAERYLDKITETTFKDVLNEELITKNMTTIVEMDNSGLFYMLLNDRIDDLRCLYELLKRVESGPKTMTNTMSRFLRAKGTAVVNDNTQQQPQGETVEPIGGVSNPIIFIQSLFVLKEQFDRFLLEAFNNDREFKQCIQSDFEHFLNISPKAPEYLSLYI

SEQ ID NO: 167438 - protein, 246 aa, Heterodera glycines
FPFQEDEGTNKRLMAYMKAQHGDLAHNFLLTSDSIAAAATSSDKGGIVLIAGTGSACRLLKENGEVFGVGGWGHLIGDGGGGFWITMRAIKRIFDVEDGLLWSSDTDNEKTLAFVDSFKKTLLEHFAVDSKLGLLDILYSPKFNKSRIAAFCKELAEVATGGDAFAVELFSDAGKALAQHLVAISRHCDDKMLRELPVLLVGSVFKSWHFMRLGFERCIKESNGAVTDLNRRINRVMLFQLECSAS

SEQ ID NO: 167439 - protein, 50 aa, Heterodera glycines
LLFKYAKNFRLNFFFINWSEANQILREHQKDKEKHCNDANSSNSEFKIFY

SEQ ID NO: 167440 - protein, 161 aa, Heterodera glycines
RASKSKSSTETPLSQTFGKSDDKTTAENSGNRAKSNSESRVKTTASQPIYLFGVEECILEARRVLKNVGENEKNAAGGGHKELKHQRLECPRHGIVRWDRNNRQTEEYVASAPSSSSLVVPDLSKMGPDLLFVDLEHEWAVPSVSIQRGKLVGRGAFGFVF

SEQ ID NO: 167441 - protein, 70 aa, Heterodera glycines
FISLQYIFWIVGGSGILCAFLLILIVTIFFAYCRQRDKNRKNQANMEHLRRNRDQRYTDFPARRYLKKLY

SEQ ID NO: 167442 - protein, 85 aa, Heterodera glycines
KKNFFKVITYQSLIPFLLPSSFCCCGSGVNCSRRIISSVSSSSHNHRSPRNSIPFRGRGRGRVRNRCQHELIRQLLFLQPALSEE

SEQ ID NO: 167443 - protein, 129 aa, Heterodera glycines
VVPFLIDFSSILFIFAFFSNSRLFPAIDGPPSADSHPPSVGTANGMATGRPGSVQQQFGTAASQVDTEEPEYKMLLKKLCKYHADVKRLLGRFELDTLPGVEMKIKASLVNVIQVMEGTRKGGCVFEGA

SEQ ID NO: 167444 - protein, 155 aa, Heterodera glycines
MEVAAVSNGNSANQLNFVLPPSSRCCLSLFFFRPLFPSLPVFSVFFSASAGAVFNLSFSFASGFPSRWYSCSSLSSFIVPIAPVSVPFICFTKVVSVRSSDALPPFRFWCLRLTPSALVGIGSDEIFITTTFCAASPTVCCCCCCLLRVRSMPMF

SEQ ID NO: 167445 - protein, 268 aa, Heterodera glycines
IDSLFADAYAFIAQGLCYDEVDDRDNACLMYERGLELGDKALQLDTERLSGLRNGLERVRGMVADRIDSIRSKAPHVDNRQAVENIRHSLVTVSDAIAGSTTDAELFYWLPDGVQLVVIEGDQTNAPTPPSSLAIFKLTKPEEAQKTEKASGATIEAKDAATLPLASSSPAAFIQVGPWAYPLEPGKTAILKNELGVYVMPNPSPDHPNMFVGIILPRGLAPGLESEFVYALKQFAVLNSSDIVDRMSEEQRERTSERIAQFLIRAGQ

SEQ ID NO: 167446 - protein, 133 aa, Heterodera glycines
NPEKPQGWIASARLEEASGKLQAARNLVMEGLEKIEKSEDLWLEAIRLHPPNVGKNIVANAVRALPHSVKIWLKAADLEADLKGRKIVLLKALENNPSSVRLWKAAVDLQGPEDARSLLTRAVECCPLSTELW

SEQ ID NO: 167447 - protein, 252 aa, Heterodera glycines
WSVPLRKFVHLLFTSDLMIVIGFRDRVDLLSSLIVMAILAVGCLFALLFTLFQLHSETLHLAKLGSNVLSSNPDWLRDALNYTGGHLTEEDIDAYMEQAYQQGRTWLASNIRQLADPKDAARADRLEDQAKLLVDNLYHLWEERRIEDETYKDSLTTFGSTGESTAGNKRKRELSSSQSSNGNADGEGEKENDAGGEENDEEKRAWLYGLVRNANLAMWKTELTSMVSQNIEMVWTIAHSLWHFLLMNISLL

SEQ ID NO: 167448 - protein, 45 aa, Heterodera glycines
GRPAKCVKAKMTSAEANKTIYKWRAKTAPFSQRFNLKIGGKMIFD

SEQ ID NO: 167449 - protein, 162 aa, Heterodera glycines
FIANFHRTTVPLAVLTSSSLQHIVDIYPYSGNWSRGRVVVCLVGLVADQKFESTCLRLIYCEFSPDYRTPRSGDVIIFAAYSGHLSLFWQLVSWQSGSVFGLVADQKFESTCLRLIYCEFSPDYRTPRSGDVIIFAAYSGHLSLFWQLVSWQSGSVFGLVAE

SEQ ID NO: 167450 - protein, 157 aa, Heterodera glycines
QERGEVVSVPHDFGWKRVVLRSSVMAAIGLTSESVPSFGPALDFFGGSTVALTSVVFPSVFYLYLAAGECKSQESEHFGNNEPAPFIEMVERANWKTLLLCGAIIVLSTFAGIIAPIFALKALTTTPFVTPCYVPFLFPDDEKGSALSSTNCCGPFQ

SEQ ID NO: 167451 - protein, 45 aa, Heterodera glycines
KPPKIIFKNRHFLIFWTKINKNIHVAQRTRTNTLCPLTILQKPLS

SEQ ID NO: 167452 - protein, 43 aa, Heterodera glycines
SVSEKKVKPKLFGLFKKELKIFKNFIHLPFDRKSIREPYLTFN

SEQ ID NO: 167453 - protein, 87 aa, Heterodera glycines
ATSKGCTPPIGMGPRAATSKGCTPPIGMGSCGIFKGMRPSHRHGFVRGGNIKGLRPSHRHGFVRETPVRNRALLVLYTTPNLNHRLS

SEQ ID NO: 167454 - protein, 231 aa, Heterodera glycines
  unsure (1)..(231): unsure at all Xaa locations
GNXEDXXEMXNGXXMXXFMXXGGGLFXXMFXGGREXXXKGEKXVXXLXVXLEEXXKGKNXKLXLXKKVVXKXXXGIGGKXGXVWKCXXCXGSGKVFXXXXIGXGMXXXMXXXCDXWXGEGEMVDEKEXCKKCVGRKXVXEXKIXEVKIIXGMXDNXKIXXXGEGEXEXGIEXGEVVLXXKXKXKEXXEXKXEDFFMKKKVSXXEGVXGFIKTIKXFEGRKITXXXMAXDII

SEQ ID NO: 167455 - protein, 128 aa, Heterodera glycines
MDSQQCPMKETDEHRQMRRIAFVAVVVSTVAVIASVVTLPMLYNYVQSFQSHLMVETDYCKARARDMWLEMTALQIGKGHVNRIKRGWLFGQWVPESGADAYAAGGGPSGGAPSGGAPSSASAPVGAV

SEQ ID NO: 167456 - protein, 185 aa, Heterodera glycines
  unsure (1)..(185): unsure at all Xaa locations
EXWXXKMXXGEXIXFXEXXXVVXVXXRXXXMXXIFXNNNXVMXXVMXVVXXMKMFXXXLXSXXWXXWXGEXXKXVVXXGIXXXDLXXLMVXEXXKXXXXGXNXDXVXXIXXXXLXQVXKKVEXKIVXXXXXXKKXXXXEXXXXXEXGREWFLXEGXEXGXVXKXFVXVXTNXXKVEDXGIEKKNM

SEQ ID NO: 167457 - protein, 112 aa, Heterodera glycines
RRKAEMPMRMCWSAIKLNDQRGFSSFRFLFVSPLTPFVLRFTAPLPPHLAPLDVLVPPPISVPTWPSLTRANGAIPRLENVLLFEENTPSAILPKWHLLIQKTIYKGIGTNN

SEQ ID NO: 167458 - protein, 127 aa, Heterodera glycines
LPLYDPSSISLFSANALSVDDQSSSTIAEERPLSSESQLAAKKSIGTDQTEHGETDGRFSTYHRRKNMEVVHRRNLIERLDKLKASHEAFFTVPQLKAVSNNQLSLFLRRLLKSADIKQHISTELLE

SEQ ID NO: 167459 - protein, 195 aa, Heterodera glycines
MGPISRNNLTIVEAKSEIFDALDKVGRRKFVRRGFVSASLRNETNFVVRCAVENCFLLSDYEGLDVMVTRFDAERDEKRAEKANEWLKKCQENGTKNKTAERTMRQFIDQNYNIGKVSELLDNFEKQHFNLTNDALYRNIAILRDYGSIDRCGITVSSNDRPSDNHTANAAAMVDYYFAGSFWRACESYAIYFYT

SEQ ID NO: 167460 - protein, 112 aa, Heterodera glycines
  unsure (1)..(112): unsure at all Xaa locations
GGATDSGKKEQSKGAGTSVKVRHILCEKQSKVLEAIERLXAGEKFSEVAAKYSEDKARNGGDLGWMVRGSMVGPFREAAFALAKSSVDKPIYTDPPVKTKFGYHVIMVEGKK

SEQ ID NO: 167461 - protein, 44 aa, Heterodera glycines
SSSDAGQPGEPGNPRGAGEPGQPGEKGEHGHCDHCPPPRTAPGY

SEQ ID NO: 167462 - protein, 42 aa, Heterodera glycines
KRKKAPAEEGKTAHELMIYVEIFSCLFGDFKFISFIYQCSEN

SEQ ID NO: 167463 - protein, 157 aa, Heterodera glycines
PSSPTNHLVALVTPPTSGFRQILQTKNIEFTLPFKTTEFVELGREDCPKDFLTNIGDESIGMDHDEWLRDLGISPRSKFKLKQSPSELDVSSASLLSNESKNDSSGLTNCKSSEDNSRGLSAVSSVESSKSAVLIRGAKNVEAFCRLLIGQPTLCST

SEQ ID NO: 167464 - protein, 125 aa, Heterodera glycines
QFLAIAQRGSNTEYNPRRFHAIIMRIRTTMGKTVAALVFQSARVVLTGVPHPSSVNKMAARVFRRIQHTQSITLCIHQLRVVNIVGVQTFPKRISVERLQNTLGGIYDPTIFPALRCKLSNGVKA

SEQ ID NO: 167465 - protein, 64 aa, Heterodera glycines
IHRFSLEARAHQLLAIARLHCYEFSNFYANCVPNLLSEFGRENGLGEQSRTKLEKALAHSLFKD

SEQ ID NO: 167466 - protein, 80 aa, Heterodera glycines
GTMNKSLLDKICFSKFFNQKKESKYLLLLNDYSSVIWCLIASNLSKSATSLLISFVVRPKNGIFPLPFLLGALAFHLLPF

SEQ ID NO: 167467 - protein, 47 aa, Heterodera glycines
SFPISPSICLFHAFVHVLNTDDAFHSLRIKFLINQILDLKKKKKKKK

SEQ ID NO: 167468 - protein, 77 aa, Heterodera glycines
  unsure (1)..(77): unsure at all Xaa locations
PPAXPWPAPLPPXSLXPXXXXPXAXPXPXFAPPPXPXXXPPPPPLPPXRPSPPPXPPPXXSPXXXXPPXXPPPPPPP

SEQ ID NO: 167469 - protein, 253 aa, Heterodera glycines
PFSILRSPPQRHNRLYTDRMESIWRSADGKTIKFYGNVFASLDNWLLYGLNSMVATLLAKDVFELQRIVARLPFEQHRSLSASPTALIAQLTTNAAEFTQSGPNRELLFALAKLGQQLLLLRNLQMFVKAEKHSQLGTLQTAERTLRRLTNGENISTDENNPTMDLMVLNTDNALLDFVSKHQSLKSPTAQMFFLSVILYFSFVAKDLTTTTASQKGEKIDGVAVMEGAKLMLQHSLLWTHLSSDSTHLFVNA

SEQ ID NO: 167470 - protein, 179 aa, Heterodera glycines
MAFEYMQAFIVKAPAFFEFPFSIDVVDSLIKNFICYFRDKLVEMCNLCEEELYSLLMMQHDKTAHQQMADDGASLPWQTHHSHHHHYSPSSLSKKAVPNFANLHFKTFLELIATLYERETDQIVRCSREFTDPNCEGLYDFVFRNRAISAPSLKIAYLSMLTSLCKSAESADAFFNFFK

SEQ ID NO: 167471 - protein, 90 aa, Heterodera glycines
  unsure (1)..(90): unsure at all Xaa locations
FFISGLATTIASMPAXYIVKTRIQNMSVVDGRPEFSGVVDVVRRVLANEGIFALWKGFLPYYMRLGPHTVLTFILLEQMNALYKRLKYGA

SEQ ID NO: 167472 - protein, 42 aa, Heterodera glycines
DYDHLFKLLIIGDSGVGKSSLLLRYSDDTFISRYITTIGADF

SEQ ID NO: 167473 - protein, 123 aa, Heterodera glycines
  unsure (1)..(123): unsure at all Xaa locations
DIDLGQPXPAPSAHEPDPTADPDPDPDPSIDEEAMVQADHALALQLAQEDQVEVDENDAVSFFSIAGPHTXVAIQGQQMECIGRPVGQQVDCAVQPAHFCRLDRFGRSHSFPARPIAGVNDRD

SEQ ID NO: 167474 - protein, 75 aa, Heterodera glycines
  unsure (1)..(75): unsure at all Xaa locations
FIRWFEIDVPEAIGRMAIFTPGDXIGIGVTGGDDSTVLGHVLAPLNEKHSYGLPLDLLCVDQGLKSYRDRLILSM

SEQ ID NO: 167475 - protein, 216 aa, Heterodera glycines
PFSSFLFEQFFPWLLSLIALFSIIIWLRSKTNRTLFVNHEKGRRLMAVLGSGGHTTEMLKLLAAQDDLFPGRLYVIAKSDNLSIVKVEEFERTHGNKFCVRIVPRAREVGQNLLSSLGSTVVAFFYSFKLVYQERADVVISNGPAIGLGICLSACLFDFLRLYRCRVVFVESICRVQKLSLTGWLIYYFRISHAFIVQWKNLQKKYPRSEYMGRLI

SEQ ID NO: 167476 - protein, 147 aa, Heterodera glycines
MLVKDALVRPDISKPRWDQSTFSGRARHFFTVVNPLNLLASNNQLENSRKIVTDYEKGKYSDNLSVDELWRAKHLYDSAFHPQTGEKLLLIGRMSAQVPANTIITGGMLSFYKSTPAVVGWQFINQTYNATVNYSNRSGDALSGAQL

SEQ ID NO: 167477 - protein, 159 aa, Heterodera glycines
VLLAWGRMVRWQHNDLVGDVVTLLGQFAVVGRLAGTVFDGQDVRTAWDVDNAASFALLRQPSDEVSETLDEVWLYNSSDQPLFMCVSRNVARAAAPPSDSALVPNIRRLSPGYCVRVHRICAPPAAVGSAADHAPPPLPSVASPFHRHQFVGNDLTLFS

SEQ ID NO: 167478 - protein, 110 aa, Heterodera glycines
SFQIRHEGPIKCHWAYVPFIQPDSATYICAENDAVREPGIRQQLVTLLREKKYESRMLLLLAKTYLMVQNRPTAAGCLKPPEFSKATSSRCCTLRWSTVLPTISSWPPTF

SEQ ID NO: 167479 - protein, 234 aa, Heterodera glycines
MFRTVELCAVVGVHGTERPRFAIVWSAAVQRDGTDAVEDVEAQDPADLDMGVAVDVAASATDNTWDTCAVEEPRQRIAETILGGGEECGICHSLEEASYYFPLKTMWRSFFCALVAGVILRFVNPFGSDQTSLFHVDYSMRWTFMELIPFAMLGIFGGVLGSLFIWANIKWCAYRKNSRWLGANPINEVLIVSAITGAISFFNPYTRKSASSLIKQLFDRCGPEDYTMDLCDYN

SEQ ID NO: 167480 - protein, 196 aa, Heterodera glycines
PQLLTRIRWALHHVDEDPRQADGKPVDEEEDREEVFVKPLITYYCHCGQMAMISDTAVARMPLRRRDGARVIDPKLTVAKTFCDQGETVYIRRREGLEQQYRKICRNCKVALFYQHPFNQHSVLFIFRDALLSAKEVGGLAGKSEEEKSRKVTLTKHVRNHGKVGSVTVSTIGEDEEEVEARELSESYSLNARIVE

SEQ ID NO: 167481 - protein, 270 aa, Heterodera glycines
VRQAAFVVNFLFPLSLERRCLGNRCVRCFIATFRWVPVLFVWAIICWAYYVYVVIFCLGMVESIGLQIVFLFAFNTLIFLFLWSNTQTVISPVGRPPEIFNLPHQIRSELSAAVTETEFKAILERFVRERKIPMFSRSNDGAVRCCLKCSCVKPDRSHHCSVCGHCVLKFDHHCPWVNTCINFNNYKFFMLFLGYGSLLCFFGFFTILPFFISFWQHTDLSRAEVGRFLVFFLFFLAGLFGLSMGCLFGYNLFLISKNQSTIESFRPPFF

SEQ ID NO: 167482 - protein, 253 aa, Heterodera glycines
PPHANMSRPVFAHSPPTTKTNDDHGFISIASTWRSVRTESSAATVQTDPVALSSSACGPEPPVSIECQTTDDLAGSRPIGSAAAARSAELSVSTSRGKLFDVIELATFVQRVEGPLSEMLMENLQSSAFDDWPLVNPLASLSQDDDNAISNQVGLLALSDTLVADPQSTSPSSANGLSLVAADRSKSGSSLILAYAHPHDTANSPDSSSPWCTHTAHVSVILNSQKQRTAHWHVNACPTTLTTHPDLTNLVAV

SEQ ID NO: 167483 - protein, 248 aa, Heterodera glycines
  unsure (1)..(248): unsure at all Xaa locations
EEGAADQNIWDVLVAGSNGWSNYRHQADVCHAWHVLVDHGVSPDRIITMIYDDIAHNKRNPYPGKLFNNPTMKDVYEGVRIDYRGDEVTPANFKAILLGNEEAVEGKRVLKSTSNDRVFAFFSDHGAFGLVAFHYGDDYTENILTVMELTQTLRKMHAKRMYGQMTFYLEVCESGSMFYQKIAQQINVFAVTASNAFETSWGXYCDTPIVGLQYTCLGELFSVNWMEDSDIQLFLRNETIAETFNSAK

SEQ ID NO: 167484 - protein, 92 aa, Heterodera glycines
MSALKMGCMDYDESYKPKFMFVVGTKRHFKKFFMVHDGTVVNLTPGSVINEKMVRPDIPEFFMQSHYPKKGTGKPVEYSVLVDEIGMTQDEL

SEQ ID NO: 167485 - protein, 82 aa, Heterodera glycines
DDVIYLEGQTFLIGSLGANYGGSGSALITPEGALAGILVGSDSKMTVNDALSEWLDSLHEQRHSKMVDIGAILISYRNMINN

SEQ ID NO: 167486 - protein, 128 aa, Heterodera glycines
EYFGDLWTFYLGTGTKNKFLGASGIDFLAIQLHKSENKMGEINLHKRDSNLWGQKQTPNAQPPHHRTTQNGANVYSIYWDRKKFGTSYLGTRTYFAENKTTFLKNPWVLYAPTKFHSETPRTPPDLPL

SEQ ID NO: 167487 - protein, 164 aa, Heterodera glycines
MPMPFSSSSSSDVPMPFSSSSPPPPPSSNECSLCLQWSEWNDCSQMCGGCGRKTRRRHCPSAVSCQREEKRICNRMACPEGTNFLFNNGEFHLLWKGCCVGLILNNSTAKGDGSSVRGECGPLENSENPFLRIISSLLSSHDGQKEKTKRNGGKSKSGEDKNGQ

SEQ ID NO: 167488 - protein, 206 aa, Heterodera glycines
TGSRIMSASPSAPDRSHGHHDLHRPGVDHQSAQFANPHIPPIDMLQAFCATDEKSRVWDPTFDSVLSHTANTGALAVDWTLLRELIKARMLHEVSGLHAQAEQQGQSLNRAEINAQLHVLGGFFNALTTAPFTVQRMCEIALTRQHTNVIKYLRQIERVVCVSSSVSDSDWIRNGTAGEDNDIVPIGLVASDANMATAEPIDTDMS

SEQ ID NO: 167489 - protein, 122 aa, Heterodera glycines
MSFPVPSDDDFYDETTDYLYLTNDNANPTNCEQTLANEHSAVALSSAIPGNDENSSSPAVPSERSLELLKKYFGYSRFRPLQYEVIEAALSKRDQLVVMSTGYGKSVCYQLPSLIQNNLTLV

SEQ ID NO: 167490 - protein, 273 aa, Heterodera glycines
MRQTDGQTLSPLPMTPEGASLEERLFLSNLSLADEFDVSMAFFNECVDMNHFLWEFQRDPTSRPITAAIFAVVYSLIVLVGVSGNICVLLSIGRTRSLQTVSNLFIFALSCSDIVVCCVSATFTPYTAFTKVWVFGVALCSLANFTAGTSLCFSIFVLAAISVDRFLLIRFPLNNQLRHNHALLIIPILCLFAMFVSFPMIFTQKLLRMEGYCGEFCVEDWGTNELYREIYGTLLLIVQFFVPLLIITICYIGISVRLNRNILLRRKKMGNSW

SEQ ID NO: 167491 - protein, 78 aa, Heterodera glycines
SSKVPFIIHVHSTSLKEDWDNRELNSIISDNIRQISEFLSHFDETCKAKLATLNDTITSMERKVEFLESTVTRGETLN

SEQ ID NO: 167492 - protein, 89 aa, Heterodera glycines
CGGLCCRDFANAFLCPCDEISDSAFGGHWRWCGFEFANFIRSRSGGFHFRWASHLRPVFCSQCVQMASPSVLQIRVPPLMKCCGPQESG

SEQ ID NO: 167493 - protein, 157 aa, Heterodera glycines
  unsure (1)..(157): unsure at all Xaa locations
SSSSAVSSASSVGSDNERINRRHKNLHSSSYVNQLYMNAAFGSGDESSSTETNAVDEKRKARVRGLLEQIPVDIYTEGAKGPAECAICMGDFEEGDSIRFLPXVHSYHLQCIDDWLLRSFTCPACMEPVDSALLSVFTGNTSTDLNALTGSASACNS

SEQ ID NO: 167494 - protein, 135 aa, Heterodera glycines
CSNLDPALINVLLDDVQLLTDSQTDNDTLLFPIVKAFRQLHAQLKEELSCVLSGQIGSEPKPFTLLSILEKQPKKKSDDKLEKEKEMPNSNGKEKALNECAESIEVISLKEQKASELNIDKMKTDVANTTRKNVL

SEQ ID NO: 167495 - protein, 95 aa, Heterodera glycines
MTVLVVETVVQVFKNSVPEKFNLITVNGADLKFAGKSYVEDTWFPGMRWTSCVCSSCSSHIGWYFESQKDDFVGLVLDYLISSEYADTLTKVPFG

SEQ ID NO: 167496 - protein, 87 aa, Heterodera glycines
GEEQHQQHERVFSSVTDAVKLGFVDEWEPKEWEPTDNSLQSALACEPQFSERFTQNYEQWLEEEVYGQQTDWDSLLRNSRGLLDIYC

SEQ ID NO: 167497 - protein, 147 aa, Heterodera glycines
IPSSNRRTLFADGDLPQFLLRFSDERGRPNQRHRVFPKMCQSIVCHWHIHQKTAEGLAEDGLCRGKNTICRIGGLPKGPSTVFQRHKPKKQQQKCQRRRRAGRGNGKNAGTEQGRRSSSRTNDQNSLKIILLAHKIIRDGLIICILS

SEQ ID NO: 167498 - protein, 71 aa, Heterodera glycines
  unsure (1)..(71): unsure at all Xaa locations
RPAPPGXGXKKKNPXLSXPSKEETSESCNDACHMFIAYAIRCNRRTERETGLQNRSYVTLSVKKPKKRRKL

SEQ ID NO: 167499 - protein, 76 aa, Heterodera glycines
  unsure (1)..(76): unsure at all Xaa locations
RRGPASAHXKPEMDEIQEFNEKLMKKFRLNTREKLAIPHQIQKPPKCFPLKLHFCLFLYAPRILGKILQRKAAKNR

SEQ ID NO: 167500 - protein, 139 aa, Heterodera glycines
  unsure (1)..(139): unsure at all Xaa locations
MLPHLHNGWQVDQAILAEEDRVVLIRFGHDWDPSCMRMDETLYKIANKVKNFAVIYLVDISEVPDFNKMYELYDPVTAMFFFRNKHIMFDLGTGNNNKINWPMHDGQELIDIIETVYRGEQKGRGLVISPKDXSTKYKY

SEQ ID NO: 167501 - protein, 141 aa, Heterodera glycines
WVCNDVWMDILPSFDHAQLGLKMALLSPRFDALVDKHFDGKTQFTIWKAIKIRKDTDEMPKLFVEGKSEGFPLPDRPLPNKIIFTNHKHLQIQYIDHFVIEFLRSNQQIWDKGSSFSFIVCSADKNEDNKPIWSVFVREIW

SEQ ID NO: 167502 - protein, 74 aa, Heterodera glycines
FFFFLIFFQMRFSLPWGARVYNELRILHRIKWYFSLFSRAYFFTLFLCFSPLSYSEFAYLCPGGAEFGAGYWAI

SEQ ID NO: 167503 - protein, 24 aa, Heterodera glycines
FFFFFFFLTERTLLLIALNKLDGN

SEQ ID NO: 167504 - protein, 31 aa, Heterodera glycines
CLIVYSFKISLEQFFSFMCLRQAFLNIKIGK

SEQ ID NO: 167505 - protein, 171 aa, Heterodera glycines
ESISRSTRYVAYLLSLLREANETTSLRLSAFSALLSQQHIFDDDETDANGWLAPSRANATRRRKRTGKLVAQLVGIVSTFLDAQFELAYLSDVNDYVIRLREWSASCSESQLSAEGRADPTNAWSHCQAILFLNRIGMHLIDEKTSDELSAAIGRNGAEENEVQCPFEQLD

SEQ ID NO: 167506 - protein, 141 aa, Heterodera glycines
MSQSMRIVPGNNNPQTFTHTTHTSSAPSAPGIHDTLRHGVGVSPYDAKSSVPVSAHPLEARLKNWEATQESLRMETLRRSFGMAEPIRRGMELKIVRNGEWRPMALGGGLPSVHEDILKGRDDMITWEDIFTGDETRGLAG

SEQ ID NO: 167507 - protein, 159 aa, Heterodera glycines
FIKEISTEGAATLTRFAGAQRQQHLSGNPTGSLTASDRLMKELKEIYRCQNYKNGVFTVELQNDNLYEWDVKLKKVDNDSLLAADMRQLAKPPHNQDHLLFHFTFANSFPFEPPFVRLVSPVVANGFVLSGGALCMELLTKQGWTSAYSVESLITQLGA

SEQ ID NO: 167508 - protein, 183 aa, Heterodera glycines
MIYRDSLNNLMTSLATCDNLHARWNFHEIRAIFLRRYLHQYTALELFLASRTAIMFAFPDHETVKKVVAHLPRVGVCVKYGLPQNRRASLMTPKQLFKHSNMPQKWQQREISNFDYWMFLNTIAGRTYNDLNQYPVFPWVLNNYTSDRLDMGDVANFRDLSKPIVALSDSRRKHFQARDNKLT

SEQ ID NO: 167509 - protein, 230 aa, Heterodera glycines
MPSSAPEIPPVQCFHHIEFFVSNAKQASFWHCFHFDFRRFAQRQTENASEIAIRKGPIIFVFKCSISPDDSEGIGAEVGKRGDFVKDVSYEVDYLDAVLATLQENGLELLAPKQMTTDQNGCLFVAKIAGSAGSIAHTLIQNIDYRGLFMPGFRPIADFSLTSTLLPSISLLCLDHVVEAHPEQSLGNVVDWYQQTLQMRRFWSIDDKTVHTEFSALRALLVGNGGASGS

SEQ ID NO: 167510 - protein, 248 aa, Heterodera glycines
MVERRKESPKRRRRSSSSSSSGSSSSTGSSSSGSSSSSSTTASRSPSPKKQRAAARPSARDDRTTRRSPRRSRSPHRVQPKTEKSTVSSRRSPSPRRRRPSPPSRGPRRRSRSPRHERAAPSPPPVKRERTPEPPPRRLCVRNLSRNITKAHMEEIFALFGALKSCELPMDRVHVHLPRGYGYVEYEKAEDAEKALKHMDGGQIDGLEIQCEMTFPFKGTGGGRGHSPVGINSMGIGIKRERSRSPAR

SEQ ID NO: 167511 - protein, 125 aa, Heterodera glycines
  unsure (1)..(125): unsure at all Xaa locations
LNNHIHHWSGLSWNMDYYLLMERIRPKREDQSDTQGDRRFAYVDXRNRQTKLDIYWHEMVMXNNEEHIYTGTDFLRGAAAHLLRKGDLPSQSDRKVNRNDTHKSIAYLLNAELSIPDTDHVQLHE

SEQ ID NO: 167512 - protein, 101 aa, Heterodera glycines
  unsure (1)..(101): unsure at all Xaa locations
KEHAQVNEQHIFPSSTDSDLEAFSRNPTHVSFAALAVQPTANTNDAIQRFLSYXVELLLXKIKFHQXGKTNLSHDGLNPAHVPYXWVNNPTLIEFCFNMIG

SEQ ID NO: 167513 - protein, 173 aa, Heterodera glycines
  unsure (1)..(173): unsure at all Xaa locations
IPSQGLXLEFLWEILLISLMNFLYPPSFMAFYRHHYSPPPFVPFVRSQYLMPLIRHYLHHLAVPFCPFINFSLCLPFVSSPYFIIHHRSSSFISSPLFRPFVPFTSICPFYSFFCPSRLTKCSAVHHHLFYDLFSLPSLFLLRSPRHCPIKNAVDFLSVRRSVARGEDKILFD

SEQ ID NO: 167514 - protein, 45 aa, Heterodera glycines
NFHNEQEFRFIFFVCSHHHHHHASAFVWRSLLLNKWLSRNGSNRQ

SEQ ID NO: 167515 - protein, 117 aa, Heterodera glycines
MSDPHLQLPIGRVKRICKLDPQMNTVSADAVKLLALAAEKYVALLGRCAGKWALANGRKTVQICDVEQCIQKDWLFAILEDALTDWPEDNAANREEGQSDGEEEEEENEKETRRGGI

SEQ ID NO: 167516 - protein, 159 aa, Heterodera glycines
MLNPPQNVRLIPDVVDIEKDEKGQIGIAIGGGAPHCPCLYVVQIFENSPARKNGLLGIGDEIVAVNGKVLKGYEKNAVASMIRDVKGVVRISFNRLHLVADTDVVQTLDILLKKFKHRLVDSMDEATADALGFSRAILCNDVLAQLKTRMDQKQQFYGA

SEQ ID NO: 167517 - protein, 217 aa, Heterodera glycines
  unsure (1)..(217): unsure at all Xaa locations
HDFPSFAFRTIHLGLVGPIRAISVSHWGELGWRLYIPNELELNAYEQLVDVGVEYSLRHCGYYALRHLRIEKFYGYWGQDIDSMTTSVECGRVFRVDYEKEFIGKEAMNRQLERRVSKRFVQLXVDGHDMDRDPWPHGDERIYRDGTLAGRTTTVAYGFTLEXQVRPGYVQNEQIGVTTDYLLRGSYEVEMAGKRFPSRIYLHSGLLPMIFVEDPQR

SEQ ID NO: 167518 - protein, 103 aa, Heterodera glycines
GTLLRYVASWLQSLVTFELPGAYSADDRLDLNRYEPYELLARCRHFVQQKDLLNAVRVANLIRGESARIFSDWLNDAKAHLEVRLLVELLFAHAQATGIRTTY

SEQ ID NO: 167519 - protein, 227 aa, Heterodera glycines
  unsure (1)..(227): unsure at all Xaa locations
ALISIKQRSKIVEXIYEAKSDCFAFLLSSKAGGCGLNLIGANRLVMFDPDWNPANDGQAMARVWRDGQKKACFVYRLLSRGSIEEKIFQRQAHKKALSSCVVDEETDVARHFSLDQLKTLFEFNANTASDTHDKLKCKRCFLGRELKDPPEEADTNSDLTQWHHSERDFGKVPDQMLKAVRDCAPDITFVFHQKSHDGETNRSNSPPADNGKGRRDGAEEEDRESEG

SEQ ID NO: 167520 - protein, 97 aa, Heterodera glycines
LDTAKEAAGSTRGQPSSRPSQYQRTDTRPNRQLRPECKTATSKDTATPPHGRGGGDSDPREKSRPRPPGPRTKETKQGPPRTVHGGGDNGGHGGGGA

SEQ ID NO: 167521 - protein, 272 aa, Heterodera glycines
ASRRATVLHCAVAGLSESSLEIVKLLLDAGADAECLDASGNKPVNLIAPAFDSLSKSRRKALEMFLRGGGERDELMSQEMELQMFSVPEKKEGSDNKKEYPVDISLPDINNGVYGTDEFRMYNFKVKPCSRAYSHDWTECPFVHPGENARRRDPRKYPYSCVPCPEFRKGTCQKGDSCEYAHGVFESWLHPPQYRTRLCKDETGCARKVCFFAHKPEELPPVYASTGSAMPSPKSYSARGLDMTAMSPLALNSTFLPMPTVSTPTHVSLWQK

SEQ ID NO: 167522 - protein, 242 aa, Heterodera glycines
  unsure (1)..(242): unsure at all Xaa locations
NPLKAIKGATNGIGLAIAERLSHLGSTLCVVSTTDEDYVKRAIDRIVSSXLKRSDLAGCTCHVTNSEDRCPLLKLTIQRIRSVHILVNNAGINPIFSDLLDLYESPWDKLFDENVNADFMMAKLFSPEIERICVGSIVFNSSICAYRSPQGIAAYGITKTALLGLTRDLAESLAPKWILVNAIAPGIINTKMIKSLWEGXTNGPVTXAIVTLMGRLGMPEECAALLAFFCSSDASYITGETV

SEQ ID NO: 167523 - protein, 162 aa, Heterodera glycines
ALKGIALGVTTLEHLIMRPDFGESRHGFLDQNREGIFSLIGYCFIYALSLMYARSSAKLTLRDKKLSPLNVAGELGFSLCCYCSQRVLEAHFGLSASRRLANLAYSFAMLTLFSTTCALFQLIQLVVPLPQDARRGGLVAAISRNALLHFLCANLMTGFVNL

SEQ ID NO: 167524 - protein, 61 aa, Heterodera glycines
LSPRTKPAGVLFSNSFKMSTLLYALINMSLYIVNNISDARVQAGGIHIDLENEKLICLIIP

SEQ ID NO: 167525 - protein, 80 aa, Heterodera glycines
MFEDPILPVFQCFVSSFDQIASPFVPPLGGPEFFRLFLLVPANLTYFISTISLFFCFAFSPISSKFAYYLNKHRGLCVHL

SEQ ID NO: 167526 - protein, 180 aa, Heterodera glycines
RSRGGRGRNAGQKLLAAAAHAAFPGGKNELLHTMSAIENDETKSRIWQQLKTKLHSTMVAFGSGSVQLPKLMDTFRHDWGSELTSYAVQLGFGCNDAAVYKMLLTMPDEIESGFISATGTFAFKVIPKAETSENLTKIDQSNQYQDEMRRIFARRRSSMSSGFHRSFPFNQSFHVRPPVR

SEQ ID NO: 167527 - protein, 135 aa, Heterodera glycines
SSTKSPSHFFYRNIFRGHPMGSHGKRRNVCVAKKMNKSLGTTKPKRCCSLHNNFWMDIFPFFDHAQLGLKLAMLSPRFNVLVDKHFDGKSELTIWKLIQIHNPRTAPKLSVLVNNRKLVPFPLPSKIHFKNLRIE

SEQ ID NO: 167528 - protein, 81 aa, Heterodera glycines
SRFRAVSKKVGKALFLVAGGPLIEHHISQLCEELENLHEIFIVGLYPAEEFGKFMSDGEKKYRAGASRLIQENCPVGTGGG

SEQ ID NO: 167529 - protein, 85 aa, Heterodera glycines
LFVPFLPGCSSFYLAPPISPCVSSDIAKICGEPSVAHYFECCGDSGADCCLRLNTWSIVLVSLLAFCLVACLVLCLVKCICLCCC

SEQ ID NO: 167530 - protein, 104 aa, Heterodera glycines
MTERHVLYVLLSADLLDVLRWPLGAVFTQIAHAATACIWTFREDPEVAAYMTDMDNMHKVTLKVPDEKTLLEHAKRLADEGIGHRVWHEDGMAVCIAVKPMPKH

SEQ ID NO: 167531 - protein, 232 aa, Heterodera glycines
  unsure (1)..(232): unsure at all Xaa locations
MDFENAKVLLGDAVNLDQKGATDQAIPKYLAGIDALLPCLNDFEGPKKDALRQQIERYMSRVETLRGRKMVKVEFMEQRRIVEDSIGHSYESIFAKCLDDKVTEVHVXYPWLANYHQVRSGGHHLXLVNLVKFCELLVRKCPNVRRILLQTTRPNGPSAQMDEALGQLGDSLRTKNIVLTVNYADNMHDREIRFNNGWVVKMGRGLDILQNVDKFSIGSHDYHLRAVQSNTD

SEQ ID NO: 167532 - protein, 69 aa, Heterodera glycines
  unsure (1)..(69): unsure at all Xaa locations
RGNRINVICFNCFINYFGFRFVFLWHLFTLEWVSCSTFQNQNISLGGRLTAHQRVLRHNNPLMFDHWXY

SEQ ID NO: 167533 - protein, 212 aa, Heterodera glycines
LEHFSQFEQCATCVLLRSLLLVNVALGTFHLLPPVFEFRLVFSRTRLQCGVLALQLAILPGMHSEFRFNSSQLVLQRQHALTVNVSHTQTLAQFGVEKFHVLLLGLLKSTETCQLFGELFPGPYHRFHVVRCAKRGQLNDRVGYFRHVRPQMRVQLHVPRLPYGNVDGGRRCEQCVDFVLICNNLIFDVFGSVGIIQRTECFNGINLIRSDS

SEQ ID NO: 167534 - protein, 214 aa, Heterodera glycines
SPQRLSQISSSSSSSSSSSSFSSSHPSAIGEHNVDRSIDELEEFIVQQMATPAPYPTDGKSFYDTNECAAAASAVPLPRRFASLSDLSPSFSSSSSPSSSSSSSSSSLNCGTLGRRKSPAPQTPKPKRMAPGEWDYLRVYTAIKTDTDYKTLQVPAGVSTECVIRQLVLDKLRLSLRDLNLFHLFMEVRTPRMDGTEARKILELDRMARPLDLQ

SEQ ID NO: 167535 - protein, 147 aa, Heterodera glycines
ESRKRGICSRWLLDNPIRLGGVGHVVQIDEALIARRKYHRGHRVREIWLFGMYDVHTNIGVVRIVPDRSRATLLPIIEEFVVPGSIFYSDQWAAYMGGAIPAIPVIPPYVHHSVNHTIHFVDPLTGAHTNHVECFWKNLKMKFKAMS

SEQ ID NO: 167536 - protein, 104 aa, Heterodera glycines
  unsure (1)..(104): unsure at all Xaa locations
MRLGLLPYKGGHSDTVTGLSLSPDXNHVLSNSMDCTARIWDIRPYASSQRCVKTLTGHQHNCEKNLLRXSWSPDGHRVSCGSSERFVYIWDGGCRNIDYKWGGH

SEQ ID NO: 167537 - protein, 72 aa, Heterodera glycines
SKVSDRLCFPCFFLLICQPLFCFTKYKANECPRGICMFPVSIKLDIFLAVLFDCTFLNVTCNILIVTLRLIN

SEQ ID NO: 167538 - protein, 145 aa, Heterodera glycines
SFDKLLLFDRQQTVGIDRSAYLREALRLPQSAAKVAVCRETGDVVGLCQARHLLGDRLGISLFYANSESIASALLRAVLLQFAGPDPSAKFDSFIYKTPSTNTESIRLFRQLGQNGPVERRLFYPQFSRYSLPFPGNRIFSIGDE

SEQ ID NO: 167539 - protein, 142 aa, Heterodera glycines
  unsure (1)..(142): unsure at all Xaa locations
VINLFYLAQIGIAXSPVSNNHLFLPYQRNPMPEFLMKGLNISLSTDDPLQFHITKEALMEEYSIAHQLWKLSSCDMCEMARNSVIQSGFEDRVKVYWLGPNYKEEGVLGNDVARTNVPDIRVSFRHEALVSELYNLFKALML

SEQ ID NO: 167540 - protein, 201 aa, Heterodera glycines
  unsure (1)..(201): unsure at all Xaa locations
GHIKLSDFGLCTLLRKIHRTELYRNWPSQLPTDFVSKPFESKRRAETWRKNRRAYAYSTVGTPDYIAPEVFQPNGYTKSCDWWSLGVIMXYPPFCSETPQETYRKVMNWQQILAFPPEIPISTEAKNTIKGFCCEVDKRLGNHSGIESIKQCPFFKRVDWQNIRLLPAPIRIEVKGIADTSNFDHFGDSDLALPGVKEVAS

SEQ ID NO: 167541 - protein, 76 aa, Heterodera glycines
  unsure (1)..(76): unsure at all Xaa locations
LFSPPLLLRLNLNFILGLNIVYTILFSFVPSLSIISPSSFPIFIVFFSAGASVYSRHRLFQFLITCIKYLIXKKNI

SEQ ID NO: 167542 - protein, 160 aa, Heterodera glycines
  unsure (1)..(160): unsure at all Xaa locations
PAELTMGAPGLVIDLRIEKKGTEYEQPKTRAFSGQGNELGTITPNVGGSADVVFVDAPPKLAAEETAKLVEQAQAELKEDDNLPTTQHQIQIPDTARTIVARLNQGHTVYQLRICIVTADASLGXRPLRLMTSYPTRPIDDEGLSVKDAGLLNATVLGKL

SEQ ID NO: 167543 - protein, 209 aa, Heterodera glycines
MPRLSLAVTLFATALLAALLLAPTAVNAHSRLLSPPTRFGGFCARRDEVCPPCGFRDKDHAKPENTVYARGQQVPMVWPRNNHAGGFVSFSIVPFNWKQTFEEFDANIFQFNCNESGCKSGYPEDLFGEDPKWMGENENHCSSNLEIPDYLPDGQYSVKWQWFAVGNWFGDYNRGHTDYYGCHDFTIRGGRPFNPASRPACPRFIPGDA

SEQ ID NO: 167544 - protein, 166 aa, Heterodera glycines
  unsure (1)..(166): unsure at all Xaa locations
VNLLCKIFDLSDEDVAKVKFAFEIYDVDGIGAIDGTMLGALLRALNLNPTEGFIEKLGGTKKKGEKTISLEEFLPIYSQVKKDKDQGVYEDFIECLKLYDKAENGLMSYAELHHILLTLGEKLXEKEVDEIFKDCIDPEDDEGMIPYVPFLARVCEKPVPKSIIPE

SEQ ID NO: 167545 - protein, 118 aa, Heterodera glycines
FFFKKNFFFFFFFFENIIYDKTKSEKQNKRGEEIMPRAKPNRGKGTTHFGTLFFHPKYPRGHHFAEEVKPKEELVQAVRLLLRLLFASSIFSHFLFFPLSHPPRFLRSPPFPFSFLYC

SEQ ID NO: 167546 - protein, 253 aa, Heterodera glycines
MFLFLPFCFVSLLFALMSKMTMASSNAPPELLPMEGQQSRIRIPLGTKMFKLKCPVKMDEDQSGDQSEEALIIKWSKDGAPLTGDDHFRVLSNAERDLRIRTPQVKDSGRYRCTAINEWGHRVVDFELEVFDPNGSVGAQKGALADGGSSLSEKVSAPKWRDPSTPRQTKIHLTPGAALHLQCPPSVGNPLPQVIWTREGVPVSLELTNPNAASFSLDKVPPTDSATYSCKVQNQLGSIQADFLVQVGSSTSQ

SEQ ID NO: 167547 - protein, 85 aa, Heterodera glycines
  unsure (1)..(85): unsure at all Xaa locations
KTHIVIGIASVCPLLAIMDTIFTIPSLNSXMSQMNSILRDXPEAFPSNTYSAWTDLMDAQVALTPPPNPRDNPFNSIFRAIRQLP

SEQ ID NO: 167548 - protein, 82 aa, Heterodera glycines
  unsure (1)..(82): unsure at all Xaa locations
FFFFFFFNFFFNLNLGFGLLEFWICFIPIFFLISQIIPSIFLLFFFNFSNTSSDLTIKVVGHQXYXSYEIGDKVGFFFDSFI

SEQ ID NO: 167549 - protein, 145 aa, Heterodera glycines
SAARPGSVPIDHSAIDGICSVSGVGPPAPLLPDRMLVAIVPLLPAPMAPFFVWAPANIGICVVVGAQVFRRVCQRPAPAPPLRGDNDGLRLQLAPDSDDSDLVVTAHPSRALATLNSPLGCCMCSPPSFSGLLLPLLLLLLFSNG

SEQ ID NO: 167550 - protein, 139 aa, Heterodera glycines
DLPIDYTTYVHRIGRTGRIKEGASTSFFDLAEDVELAKELVEGLQKQDQEVPDWLKLVAEGKMPLDESEAASGANSVPIAVRVPSETVPDTNSLPTFFTVPTDNVAATGANSVPLGTRVQDDGTPNGEAKDPAIQNNSA

SEQ ID NO: 167551 - protein, 218 aa, Heterodera glycines
MLFRASTSILLKNHRKSLLSAISTTMQANSSTASSAYLINQPKYAFLAELGIQQQNDGVFDGTWNASGTEVDSLCPATNTPIAKVRFGTAEDYERVIKASRAASAIWIEMPAPTRGEIVRQIGDSLRKNIDNLGKLVSLEMGKILSEGRGEVQEFVDIADYATGLSRMFSGRIMPSERKKHLLLEQWNPLGVVGVISAFNFPAAVYGWNAALALVCGN

SEQ ID NO: 167552 - protein, 99 aa, Heterodera glycines
RKTDNEQKSKRAANYGILIQTLRDGKQLNINKGYFGNVNDLQEKGIQKLHRKRGQSSGTIFSNSLIIRCRTILLFFPTTLQLSIPLKSSSSLICFRGGV

SEQ ID NO: 167553 - protein, 197 aa, Heterodera glycines
FHQVSHFIPPMFSIVLIQFFSSPFCSLFSPSFCPPPTGPSRDANTTRRKKQLIQTAVTSTIIVWTMITVSAFLLTRCQSPKMGTKVPKHHRQMRTERRTNGRIGTRRKSCADFLLNQKRGGNGTNHCSAERRRDGEDKRERDGGRSRDCNQRKSSSQSMTVKCNQPIYYWLITVAKRGFNYSADQQQETDQRTIQWF

SEQ ID NO: 167554 - protein, 155 aa, Heterodera glycines
MCRLWGRIRYCEGWDPVDQAQLALKSFSLKDVTAVFIQFDPLHGDSKSLREFWHRLTLPQVRATNPKMQVNVKMLSDGCRPQFVANLHDGRQVVFKTDGFQLPDLLMRLNRLLGLPAVGLRGEPDEALQQRIPEAKMEAHFRALAKKRKPIDFLS

SEQ ID NO: 167555 - protein, 70 aa, Heterodera glycines
GSDARAVRKSCRPNAAVRHAISEGQIHIYWGATADIDKSNEVTIPFDSDYWDSCVPVSCACGFSKVIGNP

SEQ ID NO: 167556 - protein, 244 aa, Heterodera glycines
  unsure (1)..(244): unsure at all Xaa locations
DPYERRSWNMFSIRRXAAWKDDTIPMGELKVISQIGIGRFGEVYEAYYYEPAVIKFFDMFHVDEQKRLETFKHDTACFQNVRHENLVFFRGFYTMELCRFGIVMELIGGHTLSHILHEEPTPHMNRSALEFNEIMEYAKQICQGMSYLHTKHILHKDLRSKNVFVNERRTVKITDFGVFNLKRLSFPARRDSFLVPSHWLSYAAPELVQILSHTFEPFQFTEACDVYSFGTIWVELLTNAFPFS

SEQ ID NO: 167557 - protein, 67 aa, Heterodera glycines
FFFFFFFFKLEFLLENQLNLCINSPNEKIRQKHLAIFVGTLVVFISDFFIFFNLSPVFGHFLAVLTN

SEQ ID NO: 167558 - protein, 148 aa, Heterodera glycines
KSQCFAVVRRFVLIKFFVRPPPPFLSLLSLLFLSLLSVNSHSYESSEMRIMEERGGKRMFYQPWSFMKRTPSVAKANDFQKRPEGRQFLLRWPSADHFGKRSTVVPLMRFGRRPAERAAPLIRFGKRAYIRTDAAPLIRFGRSSEERK

SEQ ID NO: 167559 - protein, 102 aa, Heterodera glycines
RRPHYQFYSRAMRVRAYQQFLSPYKTVGLDVMAKCFGVSKEFIDKELFMFISLGALKCRIDTVKDVVEMGQADNKFYQYKKLLHDGDILLNRVQKLSRVINV

SEQ ID NO: 167560 - protein, 220 aa, Heterodera glycines
LLSAEYARIANSFGPLFEELSEKTGLNIPNLEILQKVTDAIVTRANLPAFLPLPQWASSDAYIDKIVQKRLELHEQLIDLFLDPLGGWHFDQLIGRMDDVVNNRTQQKAAFYSAHDTNILTLGRYLEISPINDSFFGYASFIAFELYQDSEEYFVEMKSHPQLNGTLSRLVIPHCAHPCPFSVFRTLRPRIPPANGCPAALAFLPTIVPFTGQFREYSSF

SEQ ID NO: 167561 - protein, 67 aa, Heterodera glycines
LQKELSEMRGNNSDAVRVLEVDESNLLHWSLMLYTDREPYNKGALRVNVDGPNEYTLNTPYVTFGTK

SEQ ID NO: 167562 - protein, 69 aa, Heterodera glycines
SKGWSTSCEDGWLAGAKVNKSTRPFPVPPSLPFFWLLSGKQVKMSVNNASSLLVVCTDFAVIWSLTSID

SEQ ID NO: 167563 - protein, 155 aa, Heterodera glycines
  unsure (1)..(155): unsure at all Xaa locations
SAQPLNVLSDIDNKLHENNAFTYLLGEIETKTGLIRLHVFGALDDLYMLYLLFXRWGHLGCNITGFLYPAYISIKAIDSRQKEDDTQWLTYWVAFALLNVVEFFSNTIVYYFPFYWMMKCALLMWLNLPSTLSGPLLYTRIIRPFHLRLHKNIDS

SEQ ID NO: 167564 - protein, 227 aa, Heterodera glycines
  unsure (1)..(227): unsure at all Xaa locations
VLRTLMDDPVGTDFXPWKNIPLQQLFIGMEFLLNDQNGKTSKVAWDQLAKGVKRLFFCAKWCPPSKQMLGQLVEVYPKIKSDHPHFEIIFCSSDRSEESFNEHFSLMPWLAFPYGDEKLVQKIAKAYDICGIPSFILVDENFSLLTRNGRSVCLSDPHGYPWRRKALYELTEHTVHRLSEMPSLILFTEGSAEDIEFSCQILSPCAESVFTQQNESPQIAASLPAKL

SEQ ID NO: 167565 - protein, 147 aa, Heterodera glycines
  unsure (1)..(147): unsure at all Xaa locations
PFGRFADAHTLSLPXTIATRRNQDYQVQRMMSSYTATCFWLYGNNIQDGLLLQWVETAMGWEKFKFLFMQHFRINAEVERGLQDKDFDLLQYKIQCNDCSPPSSTFSGDRKITFKNILCPHLRYECGSTNVRFSVWRGLLELLQLFQ

SEQ ID NO: 167566 - protein, 114 aa, Heterodera glycines
  unsure (1)..(114): unsure at all Xaa locations
ELHKSTISINIHDKDGDRCVTAQVSVKYCTDTLHQHNDDLIHINLPSGAKKAVKSAXRGTADIVAPRGSIDQTMRKAGSAYHHSKDPRNPRLNTLGAHLNFANCPHSEENHNHL

SEQ ID NO: 167567 - protein, 151 aa, Heterodera glycines
KCPILFEFFPYSVRGFCFSLFLRLHELSIFTSLRLRKHVSLRKFRTRQCGAQLRVHLDIQVGEHAQDYEQVAAKDKLNELQLRVRQLLDQVEQITKEQNYQRYREERFRQTSESTNSRVLWWSVGQTIVLLLTGAWQMRHLKGFFEAKKLV

SEQ ID NO: 167568 - protein, 89 aa, Heterodera glycines
MVLLAFYSINSKLLIVSCQQSSNFSECGISDFEPQLANVSKMAIGTNHVYKGPEGGDEQAPPWIVRLIFGKSYLQRNNIGPRHILNGLH

SEQ ID NO: 167569 - protein, 41 aa, Heterodera glycines
RSNGKNSSAETHKNHWQTINQSSLSSMIVDGGGLVFRQHLR

SEQ ID NO: 167570 - protein, 65 aa, Heterodera glycines
VHSMQQQRQTLTHSNLRVATAIYRTALDVVQNISRILDSTANTATSQQQYNIVPGDCVVASVQTL

SEQ ID NO: 167571 - protein, 102 aa, Heterodera glycines
LILLMSLDKILKSDDQPYISPVINIRQFLADASAQMDRLRQYFDDIPSASAAADCSAVEQSTSSNASDPRKNFLKFVMDRGFSTEDAAKAIASGDGALAKMF

SEQ ID NO: 167572 - protein, 212 aa, Heterodera glycines
SVTLRRTDQPKHSHSFTGQLFAQFSQFLRMDTKTGGTENAAQFWLASSSDEVAPSSKKVIPPGTKVFFRWVNRTDVWASSAETHKKLLRHMQQNGRRDEARSDSNEHGMAPSPDGVDFFEPSLHSNADGLFFAVIVLLSLIGLVLVFLLGYFLVRFFQGGDDDENSLRREEKSPKHRHELRVVLVPKNGRRKSSLPSALIHPFGLGDKKHLI

SEQ ID NO: 167573 - protein, 99 aa, Heterodera glycines
VVVRSRVLTTVSRNVLPPCPPQAHSTWVSFSSSNRVWMQVAQGSEVMSMPRKHPDLTRPLQHYFFGFQLFINRRKQQVVEGFFPRFERVFCPYKTTPRN

SEQ ID NO: 167574 - protein, 225 aa, Heterodera glycines
SFEFHLRSDGASGAVGDVFYSAGVRRQKGDSARVFRAPKILRGTGAHSQFGAALTRLGNVDNDAEGTQDFAVGAPQSDSGQGSVFIYFGDKWDAFSTEPAQEIHASVLNGRIYGQNLTFFGSALAGGVDMDGDGYVELGVGAHQSDIVALFRARPIVDIQLAHFFPQKQIKIDADNTCSPSAHSCFSLFTSLRLLPRNDSSRLLSRHFADNKPQQPFLCRLSAIP

SEQ ID NO: 167575 - protein, 74 aa, Heterodera glycines
  unsure (1)..(74): unsure at all Xaa locations
PMASAALGFSNFVNGALIRHPFVVLRRQXQVHDHATCKHLTPISLFAVWSTGREKCTFFLWKGAIGTAFLWVVS

SEQ ID NO: 167576 - protein, 87 aa, Heterodera glycines
QIHPPSIYCCTSFSFGAVVAHFLQIFDESVETHLKLTESLNLCVRTTDNRFARLNIVCPMPCRVGAHMEPLKVRKKRCHHIKITLRH

SEQ ID NO: 167577 - protein, 164 aa, Heterodera glycines
AKLCAAFVRCIFPIRSHRLRPLPPAFCFRSAYVVRTFGRFGFVGWWNFVTPNWCAIDGHFGPTAFVIRDWLGFGGHVRRWTKFSTLEWSFIFRLFVFSLFCCFLSVVVLLDEFTSNFNGHFAVQCFVSELFRNLACRCHRKILFQHHKSVLLLALVSHPGSVDM

SEQ ID NO: 167578 - protein, 211 aa, Heterodera glycines
  unsure (1)..(211): unsure at all Xaa locations
LFTFLLFGAAFSAERFKPQAQQKEQPGPKLIDETTRWSKCKTDQNLTIYDFEVETLEGDFTNLEKFKGQALLVINVATFCAYTQQYIDFNPLIEKNLANGNQFSILAFPCNQFYLQEPAENHEIMNGITHVRPGXGWKRTATALSASGVNGATAPLXESLRWCLKRYSIGKREXLMYXPIRPNNFXWNFXKFLLQSKGRPAFRFHPTGWPH

SEQ ID NO: 167579 - protein, 251 aa, Heterodera glycines
MGCIHSVSDKNAKARSRQIDEQLKADHDRAQREVKLLLLGAGESGKSTIVKQMKIIHETGYSDEERKAYRPVVYSNTIQSMNAILRAMVRLKINFSTPSRKEEFAQFVQLAQTTEDGELPLELASVMKHLWADTGVQECFERSREYQLNDSAAYYLNSLDRVAQPGYVPTQDDVLRTRVKTTGIVETHFTYKDLNFKMFDVGGQRSERKKWIHCFEGVTAIIFCVALSEYDMVLAEDDEMNRMIESMKLFD

SEQ ID NO: 167580 - protein, 43 aa, Heterodera glycines; identical to SEQ ID NO: 133861

SEQ ID NO: 167581 - protein, 113 aa, Heterodera glycines
AKYLEEPCIAVNERDEPIGTVSKRECHAKPILRRALSVFMFDADNRLILLYRSQTKITFPGLWTNTCCSHPHFVDEECAGEEGIRRAAQRKVNHELGIDVDLEHMHVMGRLIY

SEQ ID NO: 167582 - protein, 183 aa, Heterodera glycines
  unsure (1)..(183): unsure at all Xaa locations
IRFHCGRLVVFSFTFASYALYHASRKTLSGVKSSLSDDWINGTDHPPFFHDSKSAQTFLGSLDSLFMFCYAIALVFWGWLGDRLKINSLMVVAFGMVGSALTLTAFGXIPFWFNFYSVPWYLFTYALFGRVPACGWPNEVPIMGYWFXKTNRGFIMGMWATCQPFGDNLGALVNSFRLPMGYD

SEQ ID NO: 167583 - protein, 46 aa, Heterodera glycines
KNKTTEAKITRYFENLKTRCISSQSRTHIQCQFRAVSPFSFAIPQR

SEQ ID NO: 167584 - protein, 228 aa, Heterodera glycines
RISKNDDVPIAKCALLSMLPKPKKEGGNGGKMLPAKKLLPISITTVQPKQTTGKQAWKNDVLDDDEEFDTKLAEKSAKRIGNEETDDDSSGAEEGSTRPTKHSFDEQSAQKQLGKSVAQITLNRPLGIDYGDSDSSEDEANDNNETDGEMDSRAKDFFGLLSTSPVEKRAKMDDQFNAEPQLFIEDVEPGPSRPPNHQIVGMGRAEGNEGPIKNVRAISDEQAHRLIY

SEQ ID NO: 167585 - protein, 253 aa, Heterodera glycines
ENERHFRNPFLENVADGARAVSREWLLQKLETLTERIASRKIRAEENGKVGPYVGPSGIAYSLIKASRKLNQSQSNLSDYIRTLLATESDYDAKKTSDSHKCRYLTGSLGFFTVRAIADFYFKNETDVSSLSAHFRKLLPTVLSSNIEEFEMLNGRAGFLASLLELRTHFGQQLLSDSEVRQVLGFMVISGKNYSGKCNSTAKLMYKWHDKEYLGAAHGVSGIYQMMLSFWNLLDASAKSDLTQSVDWLMSTQ

SEQ ID NO: 167586 - protein, 266 aa, Heterodera glycines
MVKSVVSLLPSYKISSPSTTSNTTPSTNSSDDSCDNERQQQQQQSDDIKRVNGDMKSLRNAAYGEKTMLARSEQGSVWKSIATDEDGTTRNVTIKLLRAPFHSPGTAKYTLREVALLSTLNHPNLIALYDVRLPPKLKPLKKFDDLHLVTEYFGKNLRERIVEKLKNGTLWTHQELSYCIIQILCGVNFLHNSGIVHRDLKPTNVVMNERGNLKILDYGIARDIVPENLTTEAGTPIYRAPEIYLGIDSYDKKVDLWSVGCIFVEL

SEQ ID NO: 167587 - protein, 172 aa, Heterodera glycines
CTCLLEITRMGRAGVVLSSGAEDMLQLRGPFDVSNLCSLFGLTPKCGRRFVSSNALSVLLRSQTRRHTVKGAIHQVDLAFSPQVASTSNNSLLPNKNITEQLATIEEFAIEMSAAQMEVKCPAEERENERGEKDEKRPKQKKRKLEEEVDREHGTGRGDPPTNFENLMELFA

SEQ ID NO: 167588 - protein, 167 aa, Heterodera glycines
  unsure (1)..(167): unsure at all Xaa locations
MDDENEPQESEETAMDTEDDELPIVRLLIASDIHAGFAENKEHISNDSFETFREVLKIGVDSKVDFVLLGGDLFHENHPSRETQLKVVRLLRKHCFREGPLWLEFLSDPTRHFQHSNFPXAHYLGRESSRGPAPFFQSHGNHDDXCSEKGLSALELLPQRPGSLNLF

SEQ ID NO: 167589 - protein, 275 aa, Heterodera glycines
ITKWRGTEKICHFVSSLKKDGIEISESATDTLFVSNSSHLVGVPFESLELLFRRFDLHCAFTVYPANKSYSLVHFSEVNLAIAARNALNGTKPKDFPSENAAQIHLFFVRQKAANRSPPAALPNGLQIVPDFISTQHESELEQFVANCLAERTNIQELKNRHVFHFGYVFNYNENNATDEAPQIPPIFDRIIDEICSSFDCQSAEIRPNQITVNVYEPGHGIPLHLDAHSAFEEPIYSLSLLSDVVMEFRDCANSARRASAHLPRRSILSLRGDV

SEQ ID NO: 167590 - protein, 26 aa, Heterodera glycines
  unsure (1)..(26): unsure at all Xaa locations
FFFFFFFXNLLVISSSSSFIHICFYG

SEQ ID NO: 167591 - protein, 87 aa, Heterodera glycines
EPVLTDTALGVAGSAERAKQLAACIPKSCIPMELANEADPEIHYRTTGPDIWQPTHGKVDACIYGIGSRTTVYGVRRFLRDMNPDID

SEQ ID NO: 167592 - protein, 42 aa, Heterodera glycines
  unsure (1)..(42): unsure at all Xaa locations
CLFFVSVHFLCLLLSEYTFTLLNYFECFPIKVRCXKKKKKKK

SEQ ID NO: 167593 - protein, 47 aa, Heterodera glycines
FFFFFFFFTGSRFIPMKSKFIFIPNSVLCEFTFIGWGYKQTLKIIYH

SEQ ID NO: 167594 - protein, 202 aa, Heterodera glycines
LSAIVSPPLPQCFFALLSLAVCYRVGPPSDLRTLNLLVWLLRLSSLSALYFFSLNRFRAIVSVIFLLIFSIWCNYRREIRSFAIITQNKISTFIYGPQPREFLTESEYREEARIYTQLELDKLRQHIQSRQVCDTLRLIYQLHTPNRTSSFIAGNAEHISPEERRSHCELFGFSEAQRNGDDETDEITDEYENDEYITDDDE

SEQ ID NO: 167595 - protein, 213 aa, Heterodera glycines
  unsure (1)..(213): unsure at all Xaa locations
PTDDPKNRAKILTEKFEMDATDSRKIWCFGPEGTGANLLIDVTKGVQYLNEIKDSVVAGFQWATKEGVLCDENMRGVRFDIHDVTLHADAIHGGGGQXIPTARRVFYASVVTGKTSLLEPVYLRGDPLPQAGGGGIYGMPKPPPWGPPWRKNKMLGTPMLSAREFXPANKHSGSPAGLRPTPGGQGFRQWVXEHFQVFPGIPLMDFSPPGRVP

SEQ ID NO: 167596 - protein, 259 aa, Heterodera glycines
SNSSDHQNEEEDSKGTKSKSGDSFPPRHSHTFIGSTFAIWSLIFLLFATFASLQYYLPKAASSCLCPAAEFGRLTAQRAYNDSSFGNPKILPDGRIEYELAVVSDLDHDSKMEDRKETWRSFFRRGRLLFRPDIPSVQVQWAKDKQDNTLYSQLSSGGRAMELSELCVYDGHLLTVDDRTGIVYRMDNFKDMVPWVLLNDGPGNATKGFKGEWMSVRHNLLYVGGLGKEWTSVTGEFINYNPMYVKVINPYGEVLHVDW

SEQ ID NO: 167597 - protein, 78 aa, Heterodera glycines
VLSCPFVISLFVNPFSMASLLSRVLYVTSIFFVFLYLLVPALFFFFPTFMQHIFFLHFVCFPFVDYHNNLRDVVRNHP

SEQ ID NO: 167598 - protein, 136 aa, Heterodera glycines
MFRSPALFAMFLLLLIVFQLFGVGIVQGSKRSKGRARTKESEGISNRGKESAKEKVDELEGKKTQKKEEEEQKEEKEKAKKDQLTGEGIGMAPTGGRRAHREGGEVNEHREDGQGTVTLRRAPGELGEMGTKKKHR

SEQ ID NO: 167599 - protein, 86 aa, Heterodera glycines
FINCFFLPSHNHCHAWTPCGILPCFVYVLNWFGIHCFSVAQRRNARAETKLRLRCDECSLENKCQQNISHFEYLLKLRCTPDKTTG

SEQ ID NO: 167600 - protein, 106 aa, Heterodera glycines
SIKVNQQMMTPQMGLFKAIPSKRTCNTSDTPNVAVNWDAIVRAQHSTTRFCSTSTARFCWYGCHPCGSVFCWCVDYRWSGLKSTDCRPTFQPSGGTTSDTDAANRR

SEQ ID NO: 167601 - protein, 218 aa, Heterodera glycines
HFANNCFLRFHLYWNLNQPKQYEELRIIRVSNEYTDELFTNAANAVGLQLDELLACIPESLIMYVNPGEVFYCLGDYSPPVPVWVGSVCADLKYNETSNVTFPPPPIPSSILPTHTIQPLIPRAIGGVSATVDFSVVNYRIQLSLVHPRELGYATNPSSDFVMFRYVVPGTPNYTVESFASTRFGSYRKRPDYEFVTHLQRSLLLMNMNIHSCSDEST

SEQ ID NO: 167602 - protein, 202 aa, Heterodera glycines
VNQLIEDKQMEMVYASLAVEGTSWTSEDNIPVQVVNTLIGQFDRTHCRNSSRLARTLSPNSGVSSFMSYTTSYKDTGLTGLFFCAEPDALFNLAQSVCKEWRQLCEEVDVDELERAKRSLLTNSLLMLDGSTPICEDIGRQLLCFDRRISTEELEEKINSITPDTIRSIGRRYFVNKPFAYVIIGKTSNWPNPRKIQKWLSW

SEQ ID NO: 167603 - protein, 126 aa, Heterodera glycines
MGVLRFTLRNAGKITLVALAVKVAADNGVWSLNSEEGASLFANFRSTVLPGTIVYREELPSADNACRSIGAAWNRNVNCAFGALRSATHSARESVQKMAAEAMAFFDDDEENKSSRGRRTAAEQRQ

SEQ ID NO: 167604 - protein, 137 aa, Heterodera glycines
MSSPAIGTSILEHPREESGAGASMVVRVTTQHQEVFYSSSPGRNRKAQPIPRRQKPTNHQPIVTEISDDSAEEQLETVPNVRRSDLCTDDAEFFRNNDEQLEDDFVGDFGRINTNNYQQPFRRRRREATSAIRNKYK

SEQ ID NO: 167605 - protein, 145 aa, Heterodera glycines
AVSVAEIANGVEEVHGQIFEVAPRYVNLSYIGEGAYGMVVSALDTVTRERVAIKKISPFEHQTFCQRTLREIKILSRFKHENIINIQAIIRAPSIELMKDIYIVQCLMETDLYKLLKTQRLSNDHICYFLYQILRGLKYIHSANV

SEQ ID NO: 167606 - protein, 94 aa, Heterodera glycines
  unsure (1)..(94): unsure at all Xaa locations
MVGFAPLTSRGSQQYRALTVPELTQQMFDAKNMMAASDPRHGRYLTVACMFRGRMVMKEGDXQMLHVQNQNSSYFVEGDPXNVKTALCDNSAQG

SEQ ID NO: 167607 - protein, 78 aa, Heterodera glycines
  unsure (1)..(78): unsure at all Xaa locations
WDKACLLTRLVASSVRLSEAAGGIIKDIMKSGDLKIVNQEQTGQMKDFATEADRSXQFCIXRSLRGEFGENLTIFGEE

SEQ ID NO: 167608 - protein, 151 aa, Heterodera glycines
EDAIQKIWLWQKPVHGFRGPDLVESNHRMLINGELHCRALWRAQMQWAKSVHAYLFDQTIVLCRRDVLRRHQLVFKERMALNGVTVQELHDGKEPITGASLRNAFKVSSQARDYVFSCPDAATKGLWLEALRERPRPQPPTPAERRLAMLM

SEQ ID NO: 167609 - protein, 221 aa, Heterodera glycines
LNICCHNSQNALSALAIKCLLLLSSSIFTLGFAELNDVCGEGRDKGNDGCGTPAGGRRFYYDTITKRCQPFAYEGCGGNGNRFDSLAQCRQKCANFESAAQGSSTGDEGQHHSMVLPVPKCSGGVRAAVNADARVIECAGTDKCPDGYTCVGNKNCCPASKEIVCGIEYDTGRYAFQGSHTPRYFYKKDIDNCLLFTYYGALGNGNNFETYNECIKYCKKT

SEQ ID NO: 167610 - protein, 159 aa, Heterodera glycines
EGGLQNWECTDDLCNFLLDNNQTMSGVDILELGCGAALPTNVALSMRADSICVQDYHALVGKCLTTRNFELHGHRMDGGKCAFMNGRWGGETLGKSGQNKLGLISARETIYDQATDSARREAMDSLLADEGKIHLAAKPHYFRRSDEVCRDSFEFVRSR

SEQ ID NO: 167611 - protein, 160 aa, Heterodera glycines
LWRKRTARTENAFAPMMQREVTKVAEAQGQTGERQTLFITAVSMLRDSECYDPTVFAAGTSPAKKHQTPSLAQIQQKFSYLVNTTKNRHAMEAHTLGENHKSEWNRALRKIARENERQQMLKGVANGKQRLVQLPLECCTESVVPVVKLVDIPLISFQND

SEQ ID NO: 167612 - protein, 248 aa, Heterodera glycines
LQLPKTTETKGTLHRVGQLRERPSGEGVGTELARGGGGELADLLREHPTDREQLVLAWRLPPGSDPLATELLESVALIVFTNSEKYEGRKIWQKGTAKKRTKRWVSSQRTNSASKANDDDDATDNSSKRRRHRTHRKMAESEQRQQCRRTALYVDFRELNWDDWIIAPTGYEAYQCRGRCAHPLPAKLNTTNHAIVQSLIHSIDPHSVSAPSCVPVQMSAISILYKDINNVIVVKTYADMRVDSCGCH

SEQ ID NO: 167613 - protein, 211 aa, Heterodera glycines
ADQTDVFGVASSSIGKPIRVELGTGSRKTIISGNLLTTDPESGSIVLVEKRQQNKTSDQGKCSQRFILIPGSSVHSAKLDGQLEEGTKSNAELREKADGIESGDEATIESHGKRTLSETVRIFDEFALSRRLCLIDALNKYGIKFSEKPHVLVQNIDNGQTEGQMPSTVISLQSGGIKIYPPYGKNDIIGGGSIVVKELLHKLSTENVFDE

SEQ ID NO: 167614 - protein, 159 aa, Heterodera glycines
ASAALTLSRRNLLAPLSVVLLPAEPAALALSRRHLPAPLSVVLLPAEPAALALSRRNPPAPLSVVLLPAEPAALALSRRNLLAPPHVVLLPAIPAALALSRRHLPSPPKAVLLASRCLSYLERKRKAARENRNRNRKWTGQKMEAKRTNWKKFDGKLFF

SEQ ID NO: 167615 - protein, 119 aa, Heterodera glycines
MVQRLVYRRRLSYNTKSNRRRVVRTPGGRLVYQYLKKPGKIPRCGQCKDTLRGIQPARPMERSRMPKRLKTVRRAYGGVLCHKCVKERIVRAFLIEEQKIVVKVLKAQKAAVKTKAPKK

SEQ ID NO: 167616 - protein, 238 aa, Heterodera glycines
ALGDANGEGDDERGRDGRRGEGGEESATEIRPCSSIGFQNNSIISRLRQSARRKVPPQNTQIQSDFPTDDGEAQETPTETLCGVNVRTLLVPNTNRPPDNISIVSSDLSEFESLGALGFSLGSWRKSSSRSYQRKAITSSALAVAAAATASAEIDKVGAAHRPVGNSSSLGTLTASSPTVLQSSPKLGFSNLLPRRPSTSPEAKKDKSAIEKAIGDTFDESKDSLMSRTEDETAAEQR

SEQ ID NO: 167617 - protein, 145 aa, Heterodera glycines
PFLRSRPQHFPSIERSVEWCVKSKTTSNLRAAKVSMPCRLKKVKDNSNGEVFQWRTNLARTEPHWQGWFSGLSKLFLQCEPVKVLILANVDRLDKELMTGQMRGQFQLEVLPKVGHAVHEDSPELVAKIFVTLVKRYNVIFQKYL

SEQ ID NO: 167618 - protein, 261 aa, Heterodera glycines
QWIILHRTDCGEEINPLLIRKHTKLIRTCLDVLPSDYAVFHSTKPTILFFMLSGMDVLGKLDASIDRPRQIEMADWVYALQLPRGNGCLSPSRRCGGFRGCVLSVPSAGLCPYESAHLAQTYTSLCILLILGDDFSRLDRRAILRAVADSQGADGSFFDGDRSNENDMRFLYCACAICYLLDDFSPINIPSLLDFVRRSVSYDGGIAQGPSLESHGGSTFCAVSALLLTGHLWDGSVLDSAKMERLIKWALMKQEEGFHGR

SEQ ID NO: 167619 - protein, 214 aa, Heterodera glycines
ETIKRSFSATANGIIGGVSPRSVLGSPASSKGSLGGWIHPPACLINARVEYVVKMLGQTEVPAPRGTKIVEDAIHAIRFHLQIERGKTGHSGAKQRMVVLQISVNCVNVLDAKSRAIIVKHHLSRISFCADDRQDKRLFSYIAKNEQGKYQCFVFLSDKMAENITLTVGEAFDLAYEKQVKKRGKELANQKHELLLRKKIAELEEENRQLKHRL

SEQ ID NO: 167620 - protein, 32 aa, Heterodera glycines
FFFFFFFVAKNVIKNNENINKTGFRQRLNCFF

SEQ ID NO: 167621 - protein, 53 aa, Heterodera glycines
PKSAHLGRLRTFGALLGDEVQDQNLMLDRIQKKTERNDGVIRSQEDQMRKLLG

SEQ ID NO: 167622 - protein, 47 aa, Heterodera glycines
  unsure (1)..(47): unsure at all Xaa locations
LLRTQRLSNDHIXXILYQILRGLKDIRSANEMHRDLKPSKLLLNTTC

SEQ ID NO: 167623 - protein, 158 aa, Heterodera glycines
TLEISRDELEHDLHSAGFAVISCPLKPDSKQVIAEIADASHRVVMITGDNVLTAIHVAVVLRFIRRSRIALILDDTRPIVTNGEQQHQQQSASTELLQSDDEDERNDNRRWIWRSSQDAGKSVALSTEALIGSHLRHGHHKFELCITGAAFEHLMDSL

SEQ ID NO: 167624 - protein, 65 aa, Heterodera glycines
PIISQQITHSFLLITWVGSFVEKPIPDFTLTIDLNFNLIPLIIKLPANRFLHPLSSHGYSGKRPQ

SEQ ID NO: 167625 - protein, 190 aa, Heterodera glycines
  unsure (1)..(190): unsure at all Xaa locations
EHLSGIAVTGTRYSLQCNGVHRVRATDHTQTFPRMEGNGPSTADLSPILPNQTLVQXTPTPVPDSTANGGPLLDYVHGVYTDCGDGPLTSPCELAVPYHTCDADMDQAVMYNPDGDFLNVPHYSIIHIHTAMDVISVGPQKIDNISQGVPLSDDASMPSHRYHLEXYDEHFQLPEFGPTGDNGIGHAYRF

SEQ ID NO: 167626 - protein, 114 aa, Heterodera glycines
MTDYDQLTTVYAGDKHLIELKVKANTRIGWQYLTEEEDIGFAVYFDPSGNANNLTEMDCVFPYIRLECSQVPISGSLLCEQSGRYIIEFDNYYSWFSAKQLRYNIEIDDRGIGQ

SEQ ID NO: 167627 - protein, 84 aa, Heterodera glycines
LSPPNPFLRFVFRPFVPLSTLCPDTLVTLLQNCPALFIIRDYSFSFTLFAFVGDSLPRLRLSGRRVEEVATENHKISERQLINN

SEQ ID NO: 167628 - protein, 96 aa, Heterodera glycines
AIKRGNRRLYGSVAKAVEAKYHQREEQKVKQYQEEREEWERRMAETRRKFETERHNFEQKMRMKREQQTEELAQMEQQMDEQSQKHCREREQQQQR

SEQ ID NO: 167629 - protein, 182 aa, Heterodera glycines
MTMDVLPSCSAPHDTNFMSQLIEKLAAASILSSAGSLCSSTSASSSSVPSSSTHPPSPPPSGAARNFNQLSGARSKRFDSAAAVPGEFHSVQNAIAVAVLVRLHQWCCRLFWLTIVCLMSYYSDQQQNQRMSTTQRHGSKKVTDLEMQLLRHLTCPQTAVLRPLRPFHHKKRHFLSRPPSPQ

SEQ ID NO: 167630 - protein, 171 aa, Heterodera glycines
QCVFYDGSFPLLLHHLRLLSSDAIVSNSDEASTSDKQQKESKNGGTPTYVVKMFRDEITINFYSVQHIVIVEWMSNPVNDLFADATLSAILHAQTNPILDKNVPKDFGAKAQQIEQNLESILVGTLCELCGDKSFVEVKEEENQGEKDAAAEESDKKEGKRRRVIQLELDG

SEQ ID NO: 167631 - protein, 133 aa, Heterodera glycines
ICFRLSGSRTCNSFDPLMAVACGAALASLVFTLKSNPDEIALRARLAQLRQQMVLIPASIHSTRAVHERLEQYTVLLNGNRLELVDFLLFSVLVERPFDKKNDFYAAHDKTLRGWPWTELWRNAWDIGAFGRF

SEQ ID NO: 167632 - protein, 96 aa, Heterodera glycines
TMILTNKLGFICKSSMKLKMQFFVGSKLPLAFLLLLLLSFVFSNAKNQKAVHSAGGTCKRGRIHCNGKCHKKCTKNSQCFHKLRCKPCRGTKGRHA

SEQ ID NO: 167633 - protein, 142 aa, Heterodera glycines
  unsure (1)..(142): unsure at all Xaa locations
MRFLTQQKAIDIYGELFGSRRFSQHQLMELAGMACAQTICETIDPGNVLIKSRSGNTRLYGLGCARRFQHVGFSPTILWPEPSLDDLMQRXMLQVERHGIPCNQSFHDPSSIEKFTFLVDALVGVRFRPSTRGAGETIFKQM

SEQ ID NO: 167634 - protein, 230 aa, Heterodera glycines
SAMVPVKSAKEYDRQLDVAVLFSECLTRAIKMGYITKEQIDDCDPNVIISLPRLAIVWGLLFYPGGALNVNVPKEDISEMFRHFHKVLILVRNLLQTLEPSELSKLEQKLVGEHDGLGESCSSVRALEQQIEPFSGRSLNRHEQQKLIEKYEYGPNDFSDSISLMRNSHRNAPLISIPCTDYETDRKENSIDRFAYGTSENLIHRLFVCIASIADQLQSNYSADIRKVLK

SEQ ID NO: 167635 - protein, 110 aa, Heterodera glycines
DSDDLRLYFSIPLEDGQLFPFVSLCDSDDKIETNFGPNFMAIIPKTFKIVPTNHEIVFRTPSMNKSPSSNPENVLRTPTTSSIISPIILASFVMLMCWLFLIFIFFRIVM

SEQ ID NO: 167636 - protein, 232 aa, Heterodera glycines
MLFSIISFIIFFYSVSSDQQQNVSPLRNVRAHYDAKMDTILVDWEWSEIGRKEIEDYKLFVHYKVSNQHRHRGLNEWHRVSSEDDSLGAKIPLGQALNNGDEITVQVFAEPIERGFATEQSDPLVIWIARKSQDKGNESGENSENGAISMADELLPPYNFTANILSPGKVRLEWRTPPLPSPSSVPFYIVNVRQLRANTGDRFPPQTLRVDGTHFLLGNLVAGENFEVTIRN

SEQ ID NO: 167637 - protein, 217 aa, Heterodera glycines
VMIIIRCFSIVSSSGSFASCFQCSTISSRRFFCHQRRAKVSTPCPPPPDPSAEFRVVPTSSVIPPISGTENPSLGRGEARRISSLITDNFRADVVARRYRLDRLRPSDWLLVYNYRVGSWLFTVGRYAFALLCVIFLIAVDDFVRVGGGKFTLQKLRVTHNELIRLGIVGKFFCAIALLIFFLLLRVRSLFLLRMYVHRKEPNRICATIAKGVFSKK

SEQ ID NO: 167638 - protein, 251 aa, Heterodera glycines
  unsure (1)..(251): unsure at all Xaa locations
AATTAWISIGSPNDLNEEHFPDEYEPPDVPNYGAKVKVCYARVXLADKEISRARRLRLTPSAQDTRLFPDYEVPGVIHDLGPEAPPGEYDSQVAHLVIEWASDXMCQHGYADYGAVPHLPLLAEIPDTLAMHVATSLPASASWALSASVHAQPVVEDITSTXGCCSIFTAAAGGLGLWILTLAXAFLTAGLDNTIKLIVAASIDERLCLTEHHVPDFLVHCDDSESFEYIFLRTLARLTNGLHIVFDFVTS

SEQ ID NO: 167639 - protein, 172 aa, Heterodera glycines
AVDNYRPQVAFVCHGESSTGVVHPLERFGDICNAYDVLFLVDTVASICGAPFHADALKVDCVYAATQKVLNCPPGLAPISFSEKALEKITKRKTRVPSFYFDALELGNYWGCFDEPRRYHHTAPISLVYALREGLSAVAQEGIGHMVNRHKINAKLLYDAFDQLGLELFVQK

SEQ ID NO: 167640 - protein, 107 aa, Heterodera glycines
  unsure (1)..(107): unsure at all Xaa locations
CSHEFLFICDPFMVNGQSAVDLFTSVMGRSISLLLKTLEEKIAANFDAISLFLCICFCAKFREMMADRAVVVINGYXDALVGFLWARVDAVMTGHSDSVRAIDVRKV

SEQ ID NO: 167641 - protein, 209 aa, Heterodera glycines
  unsure (1)..(209): unsure at all Xaa locations
LASPIQAISVSLCGELGWMLYIPNELDLNAYQHLVDLGVXYRLQHCGCYALPHLLLETFSVYCGPNIYTMTTPVKCRRLFWADFSXQFISHDALTRQLELGGSSRFVQLPVERSDLDRHPWPHRDEPLYRDGTLFRWTTTAAYRFSLXCAACLTLRALTRLLRVTSDYSPXAARATLQLAVTRFPGQICLHSPSLPVISSDHPLPYLPT

SEQ ID NO: 167642 - protein, 90 aa, Heterodera glycines
  unsure (1)..(90): unsure at all Xaa locations
SMCNNFQRIGFSIRGLNESAKKRINTPLMGSLTAGXSTLDILRLCQPDIXGGERGXFRMVAGWLNVGQFLFDGQLPGVVWGLRHEHSAAA

SEQ ID NO: 167643 - protein, 221 aa, Heterodera glycines
PHLLNRSFQMNSAGGDERKNDKMKGEKAEGKDGKGTAREHVEEAKTGEKDDEEDDDVVVIGEWEGGRERDTLSTASDRSPAVPHKALYPSLPSDSSASQMDPPPQYGHPQAQQQQQQQSTWFSPASFLGSSTNSPPSAANGTDQSVPSASASAQRLLTELRQRYQPWSVFFKCAKFGFPPGVAAIGPRVKRNLATFTTNYLCLFALLLLYCVLTSLLMLLS

SEQ ID NO: 167644 - protein, 60 aa, Heterodera glycines
SGKFVKMNKQKSLCFSTFVSFPFLPAFLCGIPTFQGPIGDHQTISFRHHQSDVYKHSTVL

SEQ ID NO: 167645 - protein, 231 aa, Heterodera glycines
MAHAASSLVSASAKYARRLLHIVLYGTAMGAIALTSNVVQVVTLLLYPFSRSSVARINAKICEVIWRTIDFAMERHNKAQITFSGDINSIPVNEQPVLLSQNPQLNAIESAIVISNHCAAMDWALINAVAMRRGMLAHCKYFVKASMQWVPFFGPGMRLAGFPYLSRNWAADNKKIEAVFHGLKSDKLPCWLISVLERTRSQPRKLAEAKAVSRFKKLPRVNNCMNPRKKA

SEQ ID NO: 167646 - protein, 243 aa, Heterodera glycines
RPLCEHQQLLDKLKRDLAELEAEAGGEVQKETAATKSGTVSPEKNAEMDVQDALRRKTRKRAATASSSVSSASSPTRSPKRSNAMDTCDRMEASSSHRTDESPPAINLNESNSLSHRHLAEEANASVAGDSATESTTTAAAALLVKKGRRRELDGLLKMDFGKHSPFQTSDPDKYAQEVLIEARQQQRTLALAQEEQRNARRSVESSCGGSATGKSSKRDKYAKKPFSPPVSPLPESRAASVR

SEQ ID NO: 167647 - protein, 141 aa, Heterodera glycines
MSLNPSADPLAGIYQKELTEYDLNRLPHTLKKGEDDQLLKRSDLIDTLNTEFSCPICLDLLKNTMVTECLHRFCSECIKKCIYKGNRECPTCRKKIISKRNLRADPNMDKLIDKIWPDREQYEALQREKAQKWSKHFDVVA

SEQ ID NO: 167648 - protein, 116 aa, Heterodera glycines
RVNLSIVCCFAIISLFCLFVLCFSSDHFSLPQSNECSNPSPPPYFLIIRRHFVRFFSPPPKSVAPFPSVRFPCVCLLISQSFALLNHSIIDQISHFCLTDNFLCKMNYFECCNKKE

SEQ ID NO: 167649 - protein, 96 aa, Heterodera glycines
  unsure (1)..(96): unsure at all Xaa locations
FRSLVLYRHFFDIDEDHVFARLLHSAMPAQTGNFISQFVRPYLXLRGPFWWTVCLVFSIATDGYLALFLHTYSSDDVLIDYFSYVTVATFLEYGYL

SEQ ID NO: 167650 - protein, 124 aa, Heterodera glycines
MNKRSEVLRLYRPIIRLSKDWVAQEPTNTNEEQKYIREEAQKGFKAYKNEKDPEKISELLKEAEKRLEIACHYQIPYDRPFYLPPRSSFDVDSSSKSAKQRTLHRSPISSKFLPSAASRGNSSD

SEQ ID NO: 167651 - protein, 134 aa, Heterodera glycines
MTNHPKKTQRIQRKIINAFSLFSSADSFWPSVFAFSSRAEVGLKFAQLSKHFDALTDKHLTVTECFLGILHIRRSEKGEGAEIVKFDEDGQKVLPIPQNELPDRVIGFRRLSIGFVDHSVLAFLRLIHRLIDNE

SEQ ID NO: 167652 - protein, 229 aa, Heterodera glycines
PLKKDWNLFYNEYLGLSSEERQLIHSMGLSEAVLIRHIHSHHQQKDPSKGMRIYVVFMLRQIWNQKPLWEVARYFGVPRGWLQSVLQSAVCQSSSIVRFAERTPDLWALRSLLPEMVRRLCECSRQELIPLLRIECVKIGRARQLYENGFRTVGSISKAEPCQLIKALEGKLSCWQCRRMISSAKAIIRDQIAEKAMELEELGADGLLAFPPTFSLDHQTDQRQNYESA

SEQ ID NO: 167653 - protein, 178 aa, Heterodera glycines
MSAAPTAHYAYNAGDPNVQGATSFDPQLAQKQYEAWQQYYAQTGAGQQPVQNIQQHTGQEVGGTYKAYFDQPVPGTVPPAAAPQPLASAYVGRPASNAPVFPPPQPPQVQQMAAPVGGAWAASGGPPQQRGPPAPLNSFMGGPPPYGQQTPRGGGFQRGGGSQSRWSSGGSERQFSRR

SEQ ID NO: 167654 - protein, 216 aa, Heterodera glycines
MDFRRTPGLSGTNVAAGQCEERFSHPRESECAKRLSPRGKAQKAPNFFHWTLTYLRSSDFVMPYGGFWISPEETLRLGFSPVRLPTDRTTILKDKIVRGAVWFVSNCRTESKRELAVDALSKHMLINIGGKCAKTEQGKKLCPRNATSCDHVFSAHYFFIAAENDICKDYVTEKYWDRYRLPSVPIVMRKHIYEGIVPNNSFIAMDQFDSPKAMAD

SEQ ID NO: 167655 - protein, 162 aa, Heterodera glycines
MVGHVVVSHRCCPKGKILSSRLCALTTSFPFLCIQNANKYLCIRGMHESAQNPWGWALHGRRKWGGGGFFKFGWAWHWASEKFPPGVQILSGGHFSTSSVFIFRSTKADPRGRPLSPIAHCGACQPFVSPTESHFWCHSFVELTAQKFAYCHPQWHQQKVCN

SEQ ID NO: 167656 - protein, 77 aa, Heterodera glycines
MCFFFVKVEKLARESFFFLGESFPHDSESFGAFQDTLTIQKPMLVSRPISYVFNLHPPSDIQFGNYTSLLRKSLHNK

SEQ ID NO: 167657 - protein, 260 aa, Heterodera glycines
MVVPLQSILPAIISVAYYLFVFFFAEVSRKLVDLSLKKSSLVHLFLIELIATAQMCTCVYENAIIIKHYGPSGFFLVVTFLQIAGAFFNRGAFVSPLAPIELFLRGKMDTEKFLAILLSQTLGGYSAFRLANSLWYYSQSYSTDHHQFYDSLPCALSYKVPFYCALLFELFGSFFLRFLLHRFPLSSRHFFAPPTIAAFLSFALTFIGVPGLNPVVTSSRLQGCPGLDLQWFIMTYWCCPVVGWLLASKLDKTPTKQKKK

SEQ ID NO: 167658 - protein, 95 aa, Heterodera glycines
MECVEVLILLFGKAREMAECQEIRQILPKSLTSTELYNHIFEKIFPALMPIRNSCILTVNHRYCFEGRDALGGTENRIELEENSEIAIIPPISGG

SEQ ID NO: 167659 - protein, 169 aa, Heterodera glycines
  unsure (1)..(169): unsure at all Xaa locations
MDYGLGRIRRRRSNYGAMSPTKSVQEVQPVALSWHGLTAVHAKSGRKILDNVSGMADAGQLVALMGASGAGKTTLLNTLLNRNLKSLSVEGQVLVNGHSLGRSITYVSGYVQQDDLFMGTLTVKEHLMAQAQLRMVGHTNGRXRRRVNEIIDELGLQECRHARIGFSGV

SEQ ID NO: 167660 - protein, 107 aa, Heterodera glycines
  unsure (1)..(107): unsure at all Xaa locations
KACLILQGHLFESNGILRRIGNLMADLFRGPTVEYLRLQGTELIISLTAXLPKSGLNSYLTEXSLKKDMESATPKIELVDMGPNIDFKIDRTILASDSLFITALRKP

SEQ ID NO: 167661 - protein, 115 aa, Heterodera glycines
FLLLVSFLLPSSFGSFMAPSARRILSPCFGIGFNPKIPPNESFGRANSVILIWYLCLFCWMKIFHFSKAPKVILLNDSKDKPSFRRRKVSNLSKSMRLQQNALSVLSTRGFTYIS

SEQ ID NO: 167662 - protein, 95 aa, Heterodera glycines
QFSGGTNSEGMEVTEERRKSCRKCARRTKRRTRHPSAWTIERRSRRWRRTEWRTPCQKSSANGAGTAPTRSDRHGRSSSVLLELENEVNTVAIFL

SEQ ID NO: 167663 - protein, 69 aa, Heterodera glycines
PGAYIKFEDERGVEVDQPLTTTAFLDRALVCIPPHTNAIPDEETPLQTGITALPGQRQLPPHMTNQLHD

SEQ ID NO: 167664 - protein, 175 aa, Heterodera glycines
MINTIFIVNSSHDVILEKHYKSVIHRSICDYFFDVQKQSPNAENIPPVIAAPHHYLYIVHHNSLYFIAICVTETPPLMVIEVLHRIIAIFTEYFDECSDSAIKENIVIVFELLDEILDYGYPLCTELNVLQDMIQPPNFFRSFKNQVTGRTNISEILPTGPLSNVSWRRASVNFA

SEQ ID NO: 167665 - protein, 131 aa, Heterodera glycines
DFLCAIASASYTVHFYFHVSRTSIVEPFELLLNERTTNEKLTLMKEGGANFGRNCWWTMKRCPIVGEGAAAQLEDDDGGINWDDKLNNVQINMWAPKNCIGPLSSPPAAEEEEASGSMRRKKASDECAEVN

SEQ ID NO: 167666 - protein, 195 aa, Heterodera glycines
MPATNSPQSSNLAEKATDSLLNGLQNTPAVTYEDLTVATDGFSPNKIVGRGGYGVVYRGVWKHTPVAIKRIQGKCGSDERQQRERIRQSLQELKTLAKFRHDNVLSLYGYSLDGPEPCLVYQFMSNGTLEDRLLCRNGTEPLGWAKKLFICGGVCRGLHFLHTINQMPIIHGDVKSANILLDKHFEPKLGDFGLS

SEQ ID NO: 167667 - protein, 233 aa, Heterodera glycines
AATLLDPKHAAKLAKKEAKKAEKDAKKADKKADKPAEQPAAAAAPAKESKPASPAAAPKADAPASGVAPDTDPTRLDLRVGYIISAEKHPDAESLYVEKIDCGEDEPRTVISGLVNHIPIDQMQGRPCVVLCNLKPVKMRGIMSHAMVMCATSAEGKVDVLSPPEGSKPGDLIAYEGIEGGAGPDAQLNPKKKVFESIQPGLFTNDELAAGFIKHDGTFCKMHVGGNPVLAQS

SEQ ID NO: 167668 - protein, 181 aa, Heterodera glycines
  unsure (1)..(181): unsure at all Xaa locations
HEIVFTAQMPHMRDGVQLEYSPLYQFLIGFLDLEFEFRPETTSFSEDILMECDVRMAFWRRGGPPAAGGEWVELVRSTVRRALQCLVNPDKARLGFSFDCSLLDLFHFGSLPHPQYLLNIRIPANRTLCLLSNNKGPNCAFPGPLHELRLIEIHQNGGFTLVWLWLXSALSPVLLSVLFWF

SEQ ID NO: 167669 - protein, 139 aa, Heterodera glycines
LVLELMEGGSLSELILPAKSIAYQNCHVINWTFQVAKALEYLHKFSFIHRDGEPSNMWLSLDYVVLKLGDFGTIANHRTDMTTTCGPAAWMAPEVPTGESYDFRGDGFSLGSLSLRNARAKSAIRRRSRTKFLDRVLGR

SEQ ID NO: 167670 - protein, 131 aa, Heterodera glycines
MSAVEAVQTFGRKKTATAVAHCKRGKGMLRINGSPIDLVQPEILRYKVYEPILVVGKERFADVDIRVRVSGGGQVSQIYAIRQAIAKAIVAFYAKFVDEGSKNELRKMLVDYDRTLLVADPRRCEPKKVCG

SEQ ID NO: 167671 - protein, 248 aa, Heterodera glycines
  unsure (1)..(248): unsure at all Xaa locations
GNASVCSLFSKSATGDALTSLYSDMRPMITRVRDEVEAFRINTKSDCTDMMDVQMAKTAPLKILDNPYDSIFCAKCKLLGHCQCAGLQXPSCHPGTPCSVGPPGQPXTVWRRKNPGQAGQSGQPXAHCPAQNILCPLXPAGPFGRCGRHGQAGQHGASGQPGTLNGGGGSGTTGVLGPQGQPVQQGRSGFAGXPGQRGVNGIVSQQIPIPNGSPGASDQNANSGSQGLPGXPGRHGPSGSRGAPDRSA

SEQ ID NO: 167672 - protein, 246 aa, Heterodera glycines
MTAAEATTTALPTSADLSRSASAVEMFPRRHRRAVSVNECLFQQQQQGQFNQRSLLDETPSSSCLGSPCSSASLPAHFPAAAVAATSTVLKSDQISPIARFAFSDLVITVLRLDFYRTGDPEAIKFCKHSLDILLKWGELPAKTQQSLRHRIEENHPFNEDIGALITAVKLDPELCQPQGLLHLLGSLLLCVLVDGDYDARFRVLLRHISALLGIHWDLFEEFESTLCDRLIDQYNETVDNQKVRE

SEQ ID NO: 167673 - protein, 81 aa, Heterodera glycines
MLCRVIVFPLSFASFAFIKCQFPLPFPFLTFLCFLCCSFSFHFFRSFVSNHSFFDSMIDQMSFKSIETFLLILNLNCSNYK

SEQ ID NO: 167674 - protein, 102 aa, Heterodera glycines
  unsure (1)..(102): unsure at all Xaa locations
QHMGGRKYYSCLRCXTYLTNXSELIYTXFTGATGQAYIFTNIANIIMATVXSPFMITGQHIFRYMLCKICNRXLGWMYEFAHQQQPLYNQRLDTYRALIANP

SEQ ID NO: 167675 - protein, 260 aa, Heterodera glycines
MLTRSQIDLAAAKRLFPPSVPSLSTVPHATVVPRDMREVQPQTAGQVIPANELTRAINDHLKIQVLISSFQTRGHNIANLDPLGINSADLDDTIPPEVRKMFSFTEEDMDREFSLPPTTFIGGERATLSLPEIYKRLKKIYCHHIGVEYMHLTNDEQQDWIRNHFEAPEVTELPPEQKKVLFKRLIRSTKFEDFLAKKWPRKTRFGLEGCEVLVPAIEQVIDCSHELGVNSIVLGMPHRGRLNVFANVCQQPVSTVLGLF

SEQ ID NO: 167676 - protein, 123 aa, Heterodera glycines
  unsure (1)..(123): unsure at all Xaa locations
LIFVGILPFFFGCLFLFSPPAPAAFPXGTCSLSDSWPYLVLDEVYHLIWAAIPNNPTPRHVKMGRHRQLDRSCTFSGAPVKGNLNKRANPSSRSIRYTSQPQRSCDSALDSSQFTRRYYGNPR

SEQ ID NO: 167677 - protein, 71 aa, Heterodera glycines
DNRRDERTVQSRQRAAYDRLMCMFATQQRPDSCGFFEKEWKNEWNCEKSSPKCLMPAQINVNKAFNFEKKK

SEQ ID NO: 167678 - protein, 121 aa, Heterodera glycines
MTAQPQQQCPASAEAVELKYLRRMLEGYQHFLSLRKASYTLVDGFPLSRRDNEDCPQSNFGTSKKICKIEASLIMDIVENFFHPFGQLPAEDKRKMFDTFYCLFSNAERAFRTYKMFGAED

SEQ ID NO: 167679 - protein, 169 aa, Heterodera glycines
VQQQCRINYSKTLDQRAQKLNELIIQWLSRNGSYYEFTTKDNFFLIANFRDFLDTAKRHEQTGTSIKAWEASFIGQFLNGFSRTRKNGNLFKRLRLVDQRMISMIDEFCEISVDFLISNQNVAAETAKTNEPEKFCAFWPKVKENASKFTQIDIAMDAFNKWINTSDLL

SEQ ID NO: 167680 - protein, 148 aa, Heterodera glycines
  unsure (1)..(148): unsure at all Xaa locations
DSSGKAGFEQLEGDDQKLLNYYQILSVILDFQIRLIVDPFLFKEGDRFLRAVNACHCCTTRRGIFHNIQNNFLVCANEXHLLRIISMQYAGHVVPTLELLIPGGNAIXSKVPISPYYRLGXLTLCPTQLPITVLASAHIRMSNILQKP

SEQ ID NO: 167681 - protein, 102 aa, Heterodera glycines
HHIFFVMTLRQSMIKCNKNTYRERVGNEQNTKHALHKTTDGTEAKGARAARVRSAPVQHGVDLAHDVHLAPVVPPGQVLLQLNERDAKITTDFGIQIKNAIN

SEQ ID NO: 167682 - protein, 32 aa, Heterodera glycines
FFFFSPQIFMLVLKMLKINNIQHKLINWPHIL

SEQ ID NO: 167683 - protein, 118 aa, Heterodera glycines
MTEILLEVCVDDADGLLAAIRGGADRVELCSALEVGGLTPTPGLIELARSLNGSVPVFAMVRPRAGDFSYSDREFDSMRKDIECVAKARLAGIVFGANHCDGTLDRHRLEIMAKMAKV

SEQ ID NO: 167684 - protein, 141 aa, Heterodera glycines
LFPRTKFMKQTERIVKVYLKLKDNPGGGWGPLIQKMFGEMILAKKLGKGDGASLRANCQLALELIGEGDGATEAMVDQLAKAKPYSNFWTLTKRTTKAILCLLKGNGTESERQRSTEDILRMLKTFAEDGESLKMVQKGKG

SEQ ID NO: 167685 - protein, 101 aa, Heterodera glycines
  unsure (1)..(101): unsure at all Xaa locations
FFYFFXEYIIYSFENGESGANEINIIIIVHYYFINWLAPLTVHLLPNTHPPPKPAPRAPIELPNQSNWRFIRSGAKRHGQKQKKKKQNGRKKKRAEERHCF

SEQ ID NO: 167686 - protein, 163 aa, Heterodera glycines
  unsure (1)..(163): unsure at all Xaa locations
GVYAADSESYKVFSPLFDPVIDEYHGGFGPKQKHPPSNFGEDRLGELKDLDPDGKYILSTRIRCGRSLLGYPFNPLLMRDDYLVMQQKVRMALENLEDDPEIGGTYYPLQGMTXRTQKQLIADHFLFKEGDRFXLEGPNSNHFWPAGRDIFPSAKNTLLPRAN

SEQ ID NO: 167687 - protein, 140 aa, Heterodera glycines
EQKKKLDKKHISIFHQICSFCFHHLTRSTFLFRFSLAAFLFRSKQLRQREARRTTCGGAGRCLRDSVSAVGFAAALCVSETGADAFFADFLKCVSGRTSGAQSILKCSQKLIKTRVTKSTSNRSRGLHSFPGSASACICI

SEQ ID NO: 167688 - protein, 27 aa, Heterodera glycines
  unsure (1)..(27): unsure at all Xaa locations
FXXVVKYFFFTNKKYRNLCGKFEVFGM

SEQ ID NO: 167689 - protein, 70 aa, Heterodera glycines; identical to SEQ ID NO: 129709

SEQ ID NO: 167690 - protein, 121 aa, Heterodera glycines
VISKTRGGNGFFFFGGFVLFLSFSKPIFSKNFPEFFFFGGKGNCPGNFRIVPSFKSHLALKSFWESTGEEDEGCFQTENDCCPPRFVALLLKQKVRLSMRLYANVFQRCELLLLLPLVIIC

SEQ ID NO: 167691 - protein, 81 aa, Heterodera glycines
EERRKPSEKGNDAKIGIWGGELRLVAIVISTKNVLDYYGILATICFCLLFWSPICPSIRQIIPFVIFPRQIPWHSASRRCF

SEQ ID NO: 167692 - protein, 95 aa, Heterodera glycines
GPQVYSIKIIPFRTIHGLIYNALKLFMEENQKLFDLCVQNFNKQKEQEQLKQQNNRRRWELLEKAAMENARAIRQQQTDGEAEPYSIGEGEKKPK

SEQ ID NO: 167693 - protein, 180 aa, Heterodera glycines
NNTVPFPLPERPLPRKIRFQALEILYIDHSVIEFLRANKQIFDNKGTNLVFKLSSYLSGKEDGRTIWQFLCREIWPIFTPNIRQLGFYNGDHLVNLRRLISPTILTDLNQLNPLDSGELFPAGVADDGPNATAGQALTKWLHTPTVDGQPKELYCSDHVWGFKFDWIKTFKEEFLRSTTP

SEQ ID NO: 167694 - protein, 119 aa, Heterodera glycines
MDSMNHGYTDTEKKEFMETIMNILRDVAILQKVDIGDRSAWDVQERLSVPQQRNGTDCGIFALLFAQYSLERRQLEFGQCHIPYFRRRICHDIISVILHDQKSPVNRSDETVVQCPFAL

SEQ ID NO: 167695 - protein, 74 aa, Heterodera glycines
FVFFYFLKIKPIYCSKWRQMFTYFVLISVSPIQHSDHFRPFIHSFVSSVGVRHFALNFFFGQNLGHFALAGDLF

SEQ ID NO: 167696 - protein, 132 aa, Heterodera glycines
LHNRQIYPPINVLPSLSRLMKSAIGEGMTRADHSDVSNQLYACYAIGKDVQAMKAVVGEEALSPDDLLYLEFLTKFEKNFISQGNYENRTVFDSLDIGWQLLRIFPREMLKRIPAKTLDKYYPRGGTGARNE

SEQ ID NO: 167697 - protein, 17 aa, Heterodera glycines
KQHSQKHMRTHSLTQCT

SEQ ID NO: 167698 - protein, 25 aa, Heterodera glycines
MNKYSISNKFIKNENVQLNFMDWAM

SEQ ID NO: 167699 - protein, 158 aa, Heterodera glycines
KFGGRRKRGRRNGGENGGDRGKATDRTRAKVQTKKAGETPVSATRSRTEETKEEAPTPAPMDVVLLLDGSSSITERVFKDQMLQFCREFAKQMGVSRKGNHLALVQFAGHCRTELGLTDYFNAKKLENAISMVRYLNGGTRLGGALLYTQKKVMASAR

SEQ ID NO: 167700 - protein, 101 aa, Heterodera glycines
  unsure (1)..(101): unsure at all Xaa locations
FFFFFFFFFFFFFXIFQLVLLLIMRTLKNKCGILQGHSLVLVFTLLFSPFGFLLPRVDCELSLFFFRRSPIAQLPSLFLLHSVLPWPIPFVSIFPVVLQSL

SEQ ID NO: 167701 - protein, 78 aa, Heterodera glycines
  unsure (1)..(78): unsure at all Xaa locations
PITGIQAQQIYSAFFLWHKLLTFPHLPCLFQFSYDTTFLNIHFYNFFKLILIHSTVYHKRNFIXXKKKKKKKKKKKKK

SEQ ID NO: 167702 - protein, 28 aa, Heterodera glycines
FFFFFFYVISTPLIIIRLEDRRRSVQQR

SEQ ID NO: 167703 - protein, 69 aa, Heterodera glycines
EEIARKIGKNRRPSGDVVVLSLHWGGNWGYEISKTERDFAHQLIDRGTVDILCGHSSIHPKAIEVYKGK

SEQ ID NO: 167704 - protein, 178 aa, Heterodera glycines
AASSAQQELVAQGRVADPGPANGSEEQQWTAGLVSAAKLVAAATNQLCEAANGLVQGHSTEEKLIAAAKQVASSTAHLLVACKVKCDLNSRAMQRLQSAGHAVKTATEHLVNAARQAITQEDCRGLVISEKIVTGITQMMDAHEEVLRKERELKEARNRLAQLNRSRYEKSPEPSPEK

SEQ ID NO: 167705 - protein, 169 aa, Heterodera glycines
  unsure (1)..(169): unsure at all Xaa locations
LTKENYVEMESKVKAVFEQLKGDADHFLFKEGDRFLQEANACRYWPTGRGIFHNAKKTFLVWVNEEDHLRIISMQNGGNVGQVLERLIKGVKAIESKVPFSRDDRLGXLTFCPTNLGTTVRASVHIRLPKISAKPDFKSICDGLKLQVRGIHGEHSESAGGVYDISNKA

SEQ ID NO: 167706 - protein, 143 aa, Heterodera glycines
SLSTSRQQFYGRIFAHYISDPNNLFVISSDFCHWGQRFRYTPIESNSGRPIHEQIANLDQQGMNAIATLDPTIFNEYLKKSQNTICGRNPICVMLQAAEYLRQMNNHTAELRFLKYAQSNKCRSMSDSSVSYASGALFISPRS

SEQ ID NO: 167707 - protein, 66 aa, Heterodera glycines
FFFFFFFFFFFFIFFFIKKFTVNSAGNTMTNLLVSDHNNPPGKCPPHSATTATRTELSYVVLFRSL

SEQ ID NO: 167708 - protein, 103 aa, Heterodera glycines; identical to SEQ ID NO: 148262

SEQ ID NO: 167709 - protein, 43 aa, Heterodera glycines
QSRLNKRTSLKPPYSAITPTKSNLNIKFPVMIYLMNSDGWLIN

SEQ ID NO: 167710 - protein, 22 aa, Heterodera glycines
HKCCFNPSLYINYYVKLKKLFA

SEQ ID NO: 167711 - protein, 145 aa, Heterodera glycines
SEKEKKVSKSTTEESSSIHCYGGNPKFKDQPEEWANSVCKDWTTWQIIEIPEFRFTYEYLDEPFRSWFKYQFYPDSIDVVKYVDDEYFEKYEGQTQDGKRHGEGVLTWKNGDVYKGPFKDDLAHGKFKLHRNDNHKFKLEFIKGM

SEQ ID NO: 167712 - protein, 123 aa, Heterodera glycines
  unsure (1)..(123): unsure at all Xaa locations
APYGYTPFCDSRKSMDGFRFWRSGYWAQHLAGRKYHISALYVVDLVKFRQIAAGDRLRGQYQGLSSDPXSLSNLDQDLPNNMIHQVRIHSLPHEWLWCETWCDDVSKDSAKTIDLCNNPLTKE

SEQ ID NO: 167713 - protein, 97 aa, Heterodera glycines
EDYPRGVFLSMRLVVAFHAQYLSKLDRVYDLRCFYMEMEHELEKPFTVRMDPPTMHSKQIQMPNCRYEVLSEGPHGPPVYYATVGQMIYHKWTCEAN

SEQ ID NO: 167714 - protein, 129 aa, Heterodera glycines
PQKQLLTVPGTNNNNNNSNNNSAIVGFVGDANGDHPPLSLENNTFFPRRRSGCSSSKRRRRERPFAVFGRAMRRLRHLFGSGVDLSKRVDIVSRVAFPTLYLAFLCFYYVRFVLFQSEEWETMGGAKKL

SEQ ID NO: 167715 - protein, 59 aa, Heterodera glycines
FPVGQPLDRFCFQKSPVDQFPFPGETIFSTKFSPTVTFKQCPGDKYLLRCENSKLINNF

SEQ ID NO: 167716 - protein, 93 aa, Heterodera glycines
SPPTPRELLRAHYSLDLLAMNDPSIATFFSRALRSLRPHSSVLECTDLLLTVDDCPGDFPFVASAACDQFMYVCRGTATTLDKAICPPGGAIL

SEQ ID NO: 167717 - protein, 158 aa, Heterodera glycines
LVSAVTYTPVSNGFSITASPSTSGQTCFTVHSAESGWAAIGVGSGSMSGADIYLGWKSSQGAISVGNFEGSGHVQPSANSVQNAQQVTLLETSPSWAKLSFSFCRPTAISSNGKSITSDQSYIYASSPDQPSGSSPSNLRFSQHAGTYGSFAIDFTST

SEQ ID NO: 167718 - protein, 159 aa, Heterodera glycines
RTEDEAVIGGQTKVPWQADVQNSEREETEKNAGANVIEGVPKGFFDDEQMNSRVRETIEKQKKITSEIDRFYKEVEELEVQREDEREELNEQSALRSDIEMIDEQIERWKMVNELEKKKENIVESVATKFEQKPNFDPVEMSDDDDSDIVDFDRISWRT

SEQ ID NO: 167719 - protein, 103 aa, Heterodera glycines
MKFKLGTLPLFLLFSECLAVIPLSLSTERFLDNFEKMGKRSEVEYDQFIKGTGIPMIGFGKRDTEFDPATIPMMGFGKRGTGRPFRNNAMETKLQLWRMGLLG

SEQ ID NO: 167720 - protein, 155 aa, Heterodera glycines
  unsure (1)..(155): unsure at all Xaa locations
MAAASKSKYFELVSGFYKSYAAMQNFQRTAAKCRVVDVDEGRVKVEMEVQEEHTNTFGTLHGGLTATLVDIVTTTALCATRRGSAGVSVDLTVNYLAPAKIGXGDTILIDAFVNRRGQTMGFTGADIFRKSDGLKIATALHTKAFPREVSEAQEK

SEQ ID NO: 167721 - protein, 136 aa, Heterodera glycines
FAVFPLPISFGPSPVHFWLNCVRPISPLSRVWTLRQTHIGQAEELAQLRTMGEQMFCQEGMATELGGKLELTVRTVHQSRQYTSSDILQSLKYNAMMRRIGISEQLQCRIAKVLEEFDRVKRQLIKVRKGRSIANA

SEQ ID NO: 167722 - protein, 27 aa, Heterodera glycines
FFFFSHLFVLFFFWFSYNLFGIGHVFA

SEQ ID NO: 167723 - protein, 173 aa, Heterodera glycines
  unsure (1)..(173): unsure at all Xaa locations
LLHFFISNRHLLILAEMHDRNIFKLCPPNYELLARKYHDFRVKCFIGAGGKVCVNFADAESVRLLSQILLIEYFQLNVQLPIGHLVPRVPQRLNYILLVEDLICKNNFDTSNVWGFDIGTNLSLTRITXIISGTGASCIFPLLGARLNGWNFVATEVDANSFAYAAQNVDRNN

SEQ ID NO: 167724 - protein, 24 aa, Heterodera glycines
SCAIIFIFLFLQFYQQICEKKKKK

SEQ ID NO: 167725 - protein, 32 aa, Heterodera glycines
  unsure (1)..(32): unsure at all Xaa locations
FFFFFFFFFFFFFXIGSFIHILLPKFNSADNE

SEQ ID NO: 167726 - protein, 88 aa, Heterodera glycines
MDENKRTKREPSEGAEGQVERYTYGNGEEAPMALNLNELDNRRLEESLTKIIAYMRKVHFYCLYCGCAFSSSEEIDFECPGIIRDDHE

SEQ ID NO: 167727 - protein, 87 aa, Heterodera glycines
WLGFFLLCDASKKDGNWSRKCSATFRIVSQKSGVEDFKREYNETVFNNEAKSWGNYFISFAELMDPSKGLYNKDEDNVTLAIDFTCE

SEQ ID NO: 167728 - protein, 115 aa, Heterodera glycines
QVLERLIKGVKAIESKVPFSRDDRLGWLTFCPTNLGTTVRASVHIRLPKISAKPDFKSICDGLKLQIRGIHGEHSESAGGVYDISNKARLGLTEFEAVKQMYDGVKHLIELEKKA

SEQ ID NO: 167729 - protein, 50 aa, Heterodera glycines
  unsure (1)..(50): unsure at all Xaa locations
TKENYVEMESKVKAVFEQLKXXXXMXXSWXGTYCPLQGMTKDVQNQLIAD

SEQ ID NO: 167730 - protein, 104 aa, Heterodera glycines
LAQLNSNQFIHYISLTWFKFNFAFRSLPEDFHFEYGAGQIQRKNSFVGSARLFKKQMTRRARVLKRTLNQLRGREMATKIDQKSRIIFPAAFLLMNVFYWSYYL

SEQ ID NO: 167731 - protein, 92 aa, Heterodera glycines
VFHAFASQQWLLNFELIELRKPFQRQNRLLGVGRLALISNNESIEMEMELIRPIEKRKAPIGGEGKGRGKVGEETIGKARIEISAYDDPFYI

SEQ ID NO: 167732 - protein, 80 aa, Heterodera glycines
MALSAIKLLSLFLLVLCIGMAIEQTQAYYGWGGYGYGYPYGFYGKRQAGFGPSANVGTFGRNEGENANGGGGGPFSLNNF

SEQ ID NO: 167733 - protein, 160 aa, Heterodera glycines
QMEEEEQMEEEEEEEEEEPTPEQMARWRRRRLLPNEVVSDICEFMSFAEGSRLYTSSGLFVALLEPKRKLCLAMFLKRVEETRQKLDKTIEEVNERRRHVVQLTENIGTINARLAEMGNHLANLDTQIVVNHLKLDELHKRIAALKEPMGKLRSEGRDEK

SEQ ID NO: 167734 - protein, 147 aa, Heterodera glycines
  unsure (1)..(147): unsure at all Xaa locations
IPHKSFHKVGLESSSTGSSFPADYSKPVPLAVGSLDSRXDSGNLIDPFMRVTNXMTRHLATLRESXVTPAVYLRLVEFLHFDIQSTGQKSHCVNTFSGHHNALFLLNSRIPLVRFSSELAVDCIEDLPRSESRQSCRPQLPAASKTA

SEQ ID NO: 167735 - protein, 63 aa, Heterodera glycines
LISIIKCALIWCDCNTNGNKQFVLIYPSPLLVSQWPMEEGTSRISSTSRQIRRSDDGWMDDPR

SEQ ID NO: 167736 - protein, 179 aa, Heterodera glycines
SPQVKVNLLLHAHLMRIQLSAELTKDTDWIVLKTVRLVQACVDVLSSNGWLSPAIHAMELSQMLTQAMYSNESYMKQLPHCTPELLERCKEKKVESIFELLELNDEDRDELLQMNQAQLADIAVFCNNYPSIEVRHEITTQKSTVGQPVEIRIDLERENDFNGFAPSVIAPFFPRYPYP

SEQ ID NO: 167737 - protein, 171 aa, Heterodera glycines
MVGHKRWAHFERMRHRLDTLRERFNSLHCTVDRWNARVPGLNSSGKGTTVRSTQSMLAKHPELHIDRLAQAWPELFADFADDQNLEERLRNEHRYASQEKHARAQIEELRKEMSMALPHDLDYQSMEFMRPELRDAMDERKPNSLAAAARVPGINDTALHFLLRYVKMRRQ

SEQ ID NO: 167738 - protein, 118 aa, Heterodera glycines
LIRLLKKDEIEENTTEMNEFGQIVSQICHKNGMENGQMVLRKISTLGQQILAQLKMAEKKTQKFVYGQNRQQEAGLPLAKFGTEMMAFVKRLPDKMPEKSAFVDKLKAMETNLSLPSD

SEQ ID NO: 167739 - protein, 164 aa, Heterodera glycines
QESIDVAYRIVSDHMRAVTVALADGIGFTNQQQKKSSRKIKELFKRATIYGSQMLGMERMSMHLMVPVIVEQLGETFPEMAQNKHKIADAVRIEEERLWKQRDDGMRHLEELFRNHPPTSKVFPGKFAFIIVQNYRIELELVKRKAAQRGLTVDEAEYQRLHAQ

SEQ ID NO: 167740 - protein, 133 aa, Heterodera glycines
MAYKVQNAVSNTLQRRQFSVLACVFQSLFVVLFASFGEFHNHEEDKHNRVHANYPMFQDIHTMVIIGFGFLLSFLKKYGFSALSINLLLSSFFPSFNAGSIPHSTPEMRHRATRDLRTQAFFQLAGLALTFLM

SEQ ID NO: 167741 - protein, 7 aa, Heterodera glycines
FFNFYFI

SEQ ID NO: 167742 - protein, 63 aa, Heterodera glycines
KKHIKLERNEVERYSQSCKYRVDKAGDWRGITIIRQERDGNSKITINNYVGWQRKKGAKMRKK

SEQ ID NO: 167743 - protein, 135 aa, Heterodera glycines
PTVRQYVESRPRIDARPWQQIFPDISFPPDFVKERVKLDALLARDLLSQMLVIDPNNRINVQEALKHPYVNLWYDAGEVDGPAPTPYIEPTHGANLNVEQWKELIYNQIKDFERTRDIFGIGVTMNGDGEMLDET

SEQ ID NO: 167744 - protein, 123 aa, Heterodera glycines
LLKFHPDKYGNDEKMVKLAKQAFQVVEGLYKECNKLLLTIQSKAANRLNRSFSQSATSFHRTAYESAINEHNSSNYNHRKSVDATSSSSYFSQTDMNAKKSYQRSNSAIPTNQNINRMFTADE

SEQ ID NO: 167745 - protein, 92 aa, Heterodera glycines
  unsure (1)..(92): unsure at all Xaa locations
FPSNFPPSFCCCFCSLCCTFLHRPMLVPNGITPTQFRWPTIVALFSTICGDGSDLALKKTNKTIVNLCIILCKVLFNFVLINAINSKXXXKK

SEQ ID NO: 167746 - protein, 99 aa, Heterodera glycines
DCIRQIAQGRGWQAATANLRSRSRMSESKFVVTNRRYTMSSSSGSPLSKPSFSFFLTTSNKCITTLRRTFNQNATGDISCDILQQQQAIRFMEGHDLFL

SEQ ID NO: 167747 - protein, 184 aa, Heterodera glycines
MTIINDQFDLEEFEALDDDCVRIIGYFEPGSAALKEFEEAAEEFMGEIEFFAVVTSYWAKKTGLKRIGEVQLHHPFEDDPIYAPSSVDTEEEFEQWVEKHREPVMQKLQLDNYFNLWKDPEEDEKLVLVFCDEETREGRAMFKLMKKLADENQEHAGTLEIVLIDPDEFPLMVDVWEEMFGIDI

SEQ ID NO: 167748 - protein, 150 aa, Heterodera glycines
MFPLFTQLPFPSLLLFLSNFPSFAISFRLQGVGVKGVLLCNGAFAAHTNLAIFDVDRNPGDSDDLLDKGHTDGKGRFVLDGTTRELSQIEPELRIIHDCADDIKPCHRLFVIKVPPEFIHSGRAHKIFDIGTLDLEKKREDEQRTCQNNF

SEQ ID NO: 167749 - protein, 114 aa, Heterodera glycines
VDNICVYGNPQKDYLIALVVPNRKNLQALAEKNAVNESSWEAICANKEMAKLLEKELQNFVSGKLRREEIPRKVIICAEPWTADSGMLTEALKLKRKNIERKFAEEIRQLYEGK

SEQ ID NO: 167750 - protein, 137 aa, Heterodera glycines
MSQVRPNSYLSLEGFPEGQGYCARTRTVPDMTGHVRMPDRYKPHWGKYRDRRYPPGRRFLHKTFGLLQNPHRSNAYFYFSPLYYQSLHSERYPPTADLAPFKYNTDWALYKGPWFDYTEWFHYKRWYPPFYDMHAYH

SEQ ID NO: 167751 - protein, 152 aa, Heterodera glycines
KIHSLMICPTFSFIFAFALVRLCFGNKVIEVDGSIQEKLVLKKVNVSEDYVHYFNKFGKLGQNYFIGINENDEATKSYLPYINCQKYNKNDCDKGRSDGCMKTVKCVVTDPIRGSQQLACMANYYLRDASPNKSFSEGDIIEPSLMDCWQHE

SEQ ID NO: 167752 - protein, 65 aa, Heterodera glycines
HSSYCAVVLPFFMMCSVETDLQITVAYHFISLLPSLSLCSNFSHPFTMLKIQIWRFVHTNKAIIY

SEQ ID NO: 167753 - protein, 173 aa, Heterodera glycines
EFIFGFTGDDSSKYNGPYKLELFNGLETIDQCISSDNSSVVFSDTCKAQYPPEVVESAIALLHIVNEQRNSSSKAKQQQHHHAQALFSVLAAYLCNVGKGETETNACREKHLDKAKRMYEKMGNNEVTEKQIMEMQKARQTVFDTIIAYNDAKTGEAVHEAIVAVRKAVSASP

SEQ ID NO: 167754 - protein, 38 aa, Heterodera glycines
LKKNHSFLHGFIFSELSFNLKIINLSLNKGCFLKKKKK

SEQ ID NO: 167755 - protein, 62 aa, Heterodera glycines
IQLSSAIVLTAQMRRMLILCAEAWRRDEPVLLVGETGCGKTTAVHQFVRLHICNWHFSFINF

SEQ ID NO: 167756 - protein, 84 aa, Heterodera glycines
LNLWIEPINNLSGELSLTLWPLKILINPLTPFHVYRQPIKKSFLKWPCMFSFLEIFKTFFAAYKGTLRTVSRKMHICYIPLDRA

SEQ ID NO: 167757 - protein, 23 aa, Heterodera glycines
QFCHLFFLNIMFCLIMRIKLDNT

SEQ ID NO: 167758 - protein, 148 aa, Heterodera glycines
ASATSYVSIVSPTHLKGTSQHILALLFNGLGRGVGPIIGGFFIRQYGTRALFLSIAFLTLCVLAVYYAVNLKLKNESVKYSGFDAFDEDTAGGETLAPQGLPMHRFGGNKITEAFNQTAVTNQNYGAIEANSEEKQRDDAYDRYVTGQ

SEQ ID NO: 167759 - protein, 172 aa, Heterodera glycines
PNWFSLATGLYVESHNFTSDFMFAPNSSMLFQRDIGANDSNPFWWTGNRAPFWYAVGKAGIDVHCYWFPACHKAHVDLIVQVPQNRRHSFNNSNSIDLLPHLPTIVKHIKKYQPYRQQLVLLRYNGLDKALRSGGQSSSQTRQALSTVDNYLRKIQEELDTMDLHQSTNLVV

SEQ ID NO: 167760 - protein, 39 aa, Heterodera glycines
YQQLYNCSYDVNQVPFEDRQHIALGIHLNINSLFSELNN

SEQ ID NO: 167761 - protein, 41 aa, Heterodera glycines
KKVAAPALAHQPNDRLKQPMEGTNDLFIHSFFFVFYYCAVI

SEQ ID NO: 167762 - protein, 55 aa, Heterodera glycines
  unsure (1)..(55): unsure at all Xaa locations
NAEKGANGDGQTANSEIFNCFFSLCIFLFVYFVRIAQLNLTLFXKKKKKKKKKKK

SEQ ID NO: 167763 - protein, 70 aa, Heterodera glycines
KFCLHLIHTKTICVVERASLCSVTLLHEQRVGPQRLLLGPVQHHGKVVRSEEHGQDHHPLAHLEGDLLVS

SEQ ID NO: 167764 - protein, 81 aa, Heterodera glycines
NIDKVALLLELFERRHLPLTNEDFFHNPAILRDFGPTGKCAVRASPFYYPLANYTDTCTASYYFSGSFIHACESYIVYFFV

SEQ ID NO: 167765 - protein, 134 aa, Heterodera glycines
ERRRGELDWKLLSHAINHTQMFEQLLAKRFPSKNNYNFDRVIWSVFDSHMDIFVQEQRGKLLRFLDECALRIRSGEEKPQRETMCEPSLQAMNKINWSNVDQVGDESPYVSTIRKNLRASVPLIRDYFRTSKIF

SEQ ID NO: 167766 - protein, 114 aa, Heterodera glycines
SVIALLIFGIICLCFGIFSLIFAPKLVNKAIRENVFVGRFPNGSDNFAMEQYRDPKYDVKMQIWVFSVQNPNEIVNKGEKVNVTELGPFTYDIRMHKNNVKFGSNDSRLFYRNV

SEQ ID NO: 167767 - protein, 129 aa, Heterodera glycines
TGEALRLLIAEPERIERLHSNAIVLHQLIRNALEGTKFGLISIDCAPQKHIEYRTKDGEGREIVEQKLDRMVNRLLDHGILVTRARYLLDKEKFCPKLTIKVSCRADLNGDELENLGQKLRLTFATLEF

SEQ ID NO: 167768 - protein, 64 aa, Heterodera glycines
MPADEVESCGKSAQICLPLSFFLYRRTVSLSFVKGWGEGYGRRTIKETPCWIEVQLHRPLQLLN

SEQ ID NO: 167769 - protein, 179 aa, Heterodera glycines
YPHLNRGDLYTKQGILSMLQSGIKVEPLLLKDWSAVMDWAPHPEHKGEYLQLWGNHNLDRAVAQSQAFINECRRALGLSMKFWVAEIHEIVKNTILHYSEIRGKCNELNDALKQLDLTATPHKIRTTPSKRRSFIDMHELRDKLLMRGGTSTEGGAGKGAKNGSSVSVASEEAHAQAMV

SEQ ID NO: 167770 - protein, 140 aa, Heterodera glycines
GTAITLVARTEHDAVMLAGTSTKEVQKLTVKAFNEWDSSLSGGVDWRSKLDIQKGAVLATEMRNNSFKLAKWTLQAILVGSDYIKLGYVSRVNSRNSTQHIILGTQQFRPNESASNMNLNLDTCWGILRAIIDFFMEKPP

SEQ ID NO: 167771 - protein, 21 aa, Heterodera glycines
  unsure (1)..(21): unsure at all Xaa locations
XSTFFFFLTEKHLLQTKKPNS

SEQ ID NO: 167772 - protein, 46 aa, Heterodera glycines
IFCWSNHQSPFFNHELTSFAIPPTFYHEIFIYIYIFCFFSWKTRSQ

SEQ ID NO: 167773 - protein, 72 aa, Heterodera glycines
ICFFLLFFYKIYGGKNYSSASSALIVLRSCNTIANFSNALQFSSRNSLAFSVASSMVSRTALSRALFSLFLP

SEQ ID NO: 167774 - protein, 54 aa, Heterodera glycines
FAKLFKYVPPPLFRRSAGVLRHVQLGLGTNCRHCWCFARWRRCWPRGRSACRRW

SEQ ID NO: 167775 - protein, 142 aa, Heterodera glycines
MSKSFINIIIQFLFLLCLFYNFAKSFGEKSAPNPQQSPNFQQIPSDVLSVLSKDVAAQLEAIQNNGTLTVHEKAEQIDQIMTEQPSEVLDKIPDPPNFGTLPMNVKNHIKQILRQKGKSLDEKETELEEYVQSLQEDKPKEA

SEQ ID NO: 167776 - protein, 146 aa, Heterodera glycines
DTAHLEDTFLMSGVLGHERESDPLSRTQPVEEGKGEREEERKLNSTYPLTTPHNKVYLTEPNRTQTIEDGPTLLNLTHPVAIGGTAGEEPPKQQQHKQSQEHTDEEQRDISALAGVVPYPVTDDSSLLLLDPALATACPLINIIDS

SEQ ID NO: 167777 - protein, 65 aa, Heterodera glycines
LHTRRTHSFRRSICADAMEFVGDPFVLWPDQNTGDGVYWHPNGPLHLGLPNSARPSLNKAKKRSN

SEQ ID NO: 167778 - protein, 77 aa, Heterodera glycines
WPTNLLSPSVENCFAGSLLLLVANVFLRKGETRHVHCLIRTLCQITKPNLTQKRIKHIDMFFCHVFDFCPFLLPNFL

SEQ ID NO: 167779 - protein, 49 aa, Heterodera glycines
FFFFSTFFLIHFTMKGGPAVPIGAARTIFAFLMQFVNRFIHKKAKICGF

SEQ ID NO: 167780 - protein, 29 aa, Heterodera glycines
FFFFFKILRSFFFKIRLPKTIPLMNDHRL

SEQ ID NO: 167781 - protein, 58 aa, Heterodera glycines
HHRHKLCDCFCIQYLTTMVNVVHFVQYPSKKPKTIFYIKIYFVWNMPMYCNNIIICST

SEQ ID NO: 167782 - protein, 26 aa, Heterodera glycines
LLSNRKTANKKLVQNKNNLIEFYMAI

SEQ ID NO: 167783 - protein, 75 aa, Heterodera glycines
DPTTRICLRERERCRTRTKDAMANGRIVPMPNVIGFINFKYFFNDGRFMLFCLSLFTHLLLLSIIFLFDLILRFL

SEQ ID NO: 167784 - protein, 77 aa, Heterodera glycines; identical to SEQ ID NO: 148315

SEQ ID NO: 167785 - protein, 19 aa, Heterodera glycines
NPRSLSVIKVQITNSDQNT

SEQ ID NO: 167786 - protein, 142 aa, Heterodera glycines
RDANDENALLCAVRSRNLVVISMVRQAGGQLVVPRPRIGVELCLSAGTGGLDALKAWHAAGANLSTPDYEGRTALHIAASRGFDELCFWLCENGADPLLRDRLGRSPAEDARANIDEHMVQGLLAPNFQRIFAFFGTPWKGT

SEQ ID NO: 167787 - protein, 184 aa, Heterodera glycines
  unsure (1)..(184): unsure at all Xaa locations
NTKLNSVEKLLSKTEVAKSKMEQLCRELNKAHREEKEQNQLRCKQMQNVHADTVESFKKSLAEIQLSVEEKREHNKRVADVEKLSEHLNQLTSDYETRLAELKKIVXERESNLGVIAKTKDSELDTLHLQIGEMQKRVQQVFAENVELKKEPLSSEDRVKKSIESEIGMRKFVDDYSEKYSELT

SEQ ID NO: 167788 - protein, 139 aa, Heterodera glycines
PKEAVEEEHGEEEGHNNIHFMYSITLDHYRTRPLVTVSTHSVQKPSFVSFFPFQCRPLFLIRSFASISLPKHKSRHNPSHPNSFLFLFPLIFSLIPLPPLNALTNPKDFQILFHSNFKFANNKCITIKKKKKEKKKKKK

SEQ ID NO: 167789 - protein, 27 aa, Heterodera glycines
  unsure (1)..(27): unsure at all Xaa locations
FFFFFFLFFFLAVQIYYIYILRXKQIQ

SEQ ID NO: 167790 - protein, 47 aa, Heterodera glycines
  unsure (1)..(47): unsure at all Xaa locations
PPMPPPPPXGCRPQIVAHHPPQHRRLCRSRSALIWPLNSILVGSQLN

SEQ ID NO: 167791 - protein, 91 aa, Heterodera glycines
MRDYMPRGIHLHRICHSSMRFNIVFIQQKWTMGAVKLSVSKAFAANEIVPDVVSKAPEKLVTVEYAVGVCAKLGNELAPKNLTNAPKLSWD

SEQ ID NO: 167792 - protein, 129 aa, Heterodera glycines
ISRSGISMIASGIATELLASVLQHELGAEAPALLAEVDENASQLGATPHQIRGFMSRFHLMMPTVRRYDRCTACGHTVKQFYRTEGFEFLNRIFQCPAELEQITGLAELQRQADAFQSEVIEMDDSESI

SEQ ID NO: 167793 - protein, 33 aa, Heterodera glycines
NAFGFAPCTFMFHSFPSVYPIIALTSFLDDKYD

SEQ ID NO: 167794 - protein, 147 aa, Heterodera glycines
LSNSIEVWSSSPSQQNNNGSPAETVGEAPSLRQMQLQKNIKMLALHTLHDVVSVGPDLPSVEQYEQKKLDNQQRAMVAMRRHSGAVMAPTNNQQQQQHGTPTADHDDLVRNAQNPFIKTASILTRKMARDRPSSSSFSEFLFGDETA

SEQ ID NO: 167795 - protein, 91 aa, Heterodera glycines
HPIFHHFLRGLDTNLWSKALIASGFDINCQLTTFPSHPKRSRTKTRNSTICWRQTKAVGRTKDRPISVSNTDTRDRWIYGDNLFFSDGIFS

SEQ ID NO: 167796 - protein, 184 aa, Heterodera glycines
MHSLKLAFLCQLCVLLIGTASAAFYKSADVSWVSQQEKNGQSFYDSSGTKKDPFVLLKSYGVNAVRLRVWVNPSGGWCDGADTLHKAQRAKAQGMAIMIDFHYSDSWADPGQQNIPAAWKSHSLAQLNTDVYEHTYGILNYLKSNGISVAWVQVGNEINSGMMWPSGKVTNSNFAKLASLINNG

SEQ ID NO: 167797 - protein, 151 aa, Heterodera glycines
TEFYKPCQQKIEYLHQNDSYQLFKFSNSKYSSVYNKRLLELGIMGRPLLKQPKELENEKAIKLEKEKAKELENECNSVVEQTLRHILRTNKNAKHVVLVSHLGVIALIHELLSGEWVSVGQTTVSKFVQYAEKDSQNVDDELKRFRLEYSS

SEQ ID NO: 167798 - protein, 38 aa, Heterodera glycines
ERKKWIHCFDNVNAIIFISSLSEYDQTLREDNCTNRSN

SEQ ID NO: 167799 - protein, 108 aa, Heterodera glycines
IILGFIIDFVGDLIKGLAEKENRELLKNFFPIHVFVDVKEISVHLGELKVNILFRKIAALFGSPAASFDQICVDGSPKRIQKEEKQLALLLLYSSHNFGKLKLFKCDD

SEQ ID NO: 167800 - protein, 157 aa, Heterodera glycines
SGSDDDCETFEDEQPIDAFASQLAAADKVQKSLPKKPKKVSMPSAESIQNSLLDSLKNPSNFGPSIGKFLNLVKWKQVMNANLLLAQPQPNNQQISMPTDLNINMFKAPKEKKRVYAGRRKTTGDVQIVPYLFDICMRFLLNNIDGICQFGVGNGNF

SEQ ID NO: 167801 - protein, 60 aa, Heterodera glycines
MTNFLLVCGLNERSVRLGALFFDVFWQFVTDFCSTTFAFLVTHCLIIMLKLCHLFIVSFL

SEQ ID NO: 167802 - protein, 123 aa, Heterodera glycines
VERIDETGNVLLFIVANKCDLKEMRMVSEEEGRQFAEKQNAHYCETSALSGKGIETVMSSIAECLLQEQQRLLKSAELGHSSFDLATSSVAEAVDEKGAKRRGEEKKNGSGGNANGRGCCTIL

SEQ ID NO: 167803 - protein, 162 aa, Heterodera glycines
ALLVKYNSSKTAPPPPPSPSPPFALDAQKEESSEEKQAEAVVVGEPEQHQQQPVLETMPTTTASKQEVATQMPGEDDDEPPPPPPMPKKTASKEAETQVPDGGGDGPSPLLPQVPPNTTVKMEAATQMPPDGPPAAEEMTAVVVAIVAMILMFLFEFVSAVH

SEQ ID NO: 167804 - protein, 84 aa, Heterodera glycines
NQASHPHESCTLRPEILDAQYRHDLLAMNVYGHLLHPFQFLFHHDSILQLLQFSISPLHICGFLHHLKALNLTDYFCLRTLLNL

SEQ ID NO: 167805 - protein, 71 aa, Heterodera glycines
MVNNEKICHEFRDKCRVDSVVRCSGRCDIELGEVTKHNVMQLKRLNLSVFPVFYNDKFYKEVVNTGELAKL

SEQ ID NO: 167806 - protein, 170 aa, Heterodera glycines
SVLPQIDVHAAKLSDIVLECVDLQPFGQLLVNLLISFVGSAIVLHRQLHIPKSPNRRIFAEHSPALSPDQQDGNGKSALANQWANDNFVVHYFGQFCFGHFCSCDARIVREGNGKEIIFQSLFRARAEKGPLGHCIADLHDHTDRRIVAVRIIITGVPNARDAPVDQQQQ

SEQ ID NO: 167807 - protein, 127 aa, Heterodera glycines
GNFQFLLLFSACCYLQRKEYFAEKTERKIHRAANKKPKEETEGMAEVALFQMAMACMANRMDFQMAMACMANRMDFQMADLAAPVSIQIAAGRIAFQMVDLAAPVAFHRWDITRADFTALGPAHLLE

SEQ ID NO: 167808 - protein, 66 aa, Heterodera glycines
SLNMQILCKIGRNFDLCDHFISSCFDNIKSHFSIFHGLHPFICLVSPTQHFSYKWDCQSLFIYIFG

SEQ ID NO: 167809 - protein, 32 aa, Heterodera glycines
DCLLSALGYHTLCCLCTTGWSCLSFRILNCFI

SEQ ID NO: 167810 - protein, 70 aa, Heterodera glycines
  unsure (1)..(70): unsure at all Xaa locations
KLMKINYQIEMNLTNAGSLKKNTTEVLMPFFARTKHKMQKHKSSSKTRSKKFTICVKLIFLSYNKTKAXK

SEQ ID NO: 167811 - protein, 103 aa, Heterodera glycines
FPLLVATKLTQYAAEDANLLVLDAKSYARQAVNIIGNYRISTGCFMHDMQIAFGSFIGFNLFKLFYVPFGILGIHKRRIDAYNRKKLANERNSGGKGEGIKSE

SEQ ID NO: 167812 - protein, 82 aa, Heterodera glycines
SATPKTPGNLFSRLLKTTKNFFKKGGQPSAVLPKINAFCLLKFVKKWYFPRISVVLDFIFSRCGRVIPISQSPVHCNFYRFW

SEQ ID NO: 167813 - protein, 113 aa, Heterodera glycines
YARRLDFFETPDYEYCYGLFKTVLERTGHTYDYEFDWTHKLNQATTPSGSIHTAVGVEGGELRKTRTDYAKRAIGHHGPGFGSTQVVNSNAGEMEESARPPAPNRQQEEEHSE

SEQ ID NO: 167814 - protein, 82 aa, Heterodera glycines
MTITVTLVTVYYFIFLTSGKARSSSHQLLAFPRPALKCAVKKKRGPRETVEMGRERKAWRTLAIITGSFIACWMPFFVLSLY

SEQ ID NO: 167815 - protein, 118 aa, Heterodera glycines
NAICRTSFISGIKLTQMGKRTTQKSNGNIWHKNDTDVTNGEKFVQSVRTVHIEQGQNELCDCLSIQTIQEIRQQRSSARIARLEMNDHCSMGIVRSVDCLNAALLLCRTLIHCLWRHL

SEQ ID NO: 167816 - protein, 161 aa, Heterodera glycines
  unsure (1)..(161): unsure at all Xaa locations
MENAQTSHESEGLSRQGQGRLCPSASFGNFTDPLMIPPIALQHVYATANMVTQANVDQSNKLDLDRLPPGWEVRLTEDGSYRYYVDHNNGRTHWIHPFAPEVLKPNWTKIFDTVHGVVYYKSXDQRSQFDHPGFINGAFLPTIHGSSSFQSLLENEQEQNC

SEQ ID NO: 167817 - protein, 183 aa, Heterodera glycines
  unsure (1)..(183): unsure at all Xaa locations
DWEQPDTYWRSKEFLAWLYNKSPVKEKVVVNDRWGSGIAGKHGGFLTYQDHYXDKRSWGYRRYLKPSDVLSLAELINQLVRTISCGGNMLLNVGPDHTGRIVPIFEQRLREFGEWMNVNSEAIYGSKAWIHQSDGPTIWYTSQIRNATELSPSRMFNPQDTFKTIVYAFVLSIPRSGRINFPS

SEQ ID NO: 167818 - protein, 51 aa, Heterodera glycines
KFDSADLPLVEGAGDDLLVVGGDDLHMDISSCPGTPQISPMVSADEGDGDD

SEQ ID NO: 167819 - protein, 58 aa, Heterodera glycines
QRRLFHRKDWIINPLCAESELTDRHAMLRFYHPTHSFSVIFASAISFPFCCLFCDGFN

SEQ ID NO: 167820 - protein, 154 aa, Heterodera glycines
KEQATDNAGKERNSRIIHHFQFTTWPDFGVPVHTDHFLNFLEEVRNAREKLPEPGSEAGTVGPDSPIVCHCSAGIGRAGTFVIVDSILSMFERKWKGQQVEEGEKNGTENDERERADRTVDEKMDSLEALVVFIRRHRMGLIQTPQQLRFCWKT

SEQ ID NO: 167821 - protein, 31 aa, Heterodera glycines
MKSSQIQKIIIHSASQSSSFFTFFRFSHAVV

SEQ ID NO: 167822 - protein, 71 aa, Heterodera glycines
TQIVWKSTREVGVGRSTMRSFPQQMEKDEKITNGHSEEAVKKVVVIAFYRPAGNSNRSGQFELNVPKPIAQ

SEQ ID NO: 167823 - protein, 162 aa, Heterodera glycines
HSLYGRHYIKDKPVKELKDDEYLSFVRAQKDGLIEIDLHINSNEESENKCLRACMENDGCATFKRNENSEIVEEWNKLRNLVLTICVNKMLIPVLRRESHENLIEEAKEFVIMKAAERLHGLIETESYKPQFSYDNQDDDLHDVGTRILAVCYSSDIADASF

SEQ ID NO: 167824 - protein, 146 aa, Heterodera glycines
MDAEYSALMAELGEKPPISLEAGTAPPLVGGKPIPGFPGSGLRPRFALPAPTPIVRVNLAKQQNTPQQQSVSGGGYPGWDGAGFYGFSGLPGQDPAAAAAAWAAWQAGQSGFPSPVPPPPGGGFGHANMEAASTPGTSAGGLAMFP

SEQ ID NO: 167825 - protein, 96 aa, Heterodera glycines
LLLQQMLFLSLVKGNNDKSFDRTLKYCILLLQIKRKAEIAKTMGMNDLFCVFLFRFLGNTADVIIFKTGQIKVISAIVAHLRNALYHFAVFVVERA

SEQ ID NO: 167826 - protein, 27 aa, Heterodera glycines
FTPHFPFRHSTDILLFNNCPFLNTEFP

SEQ ID NO: 167827 - protein, 95 aa, Heterodera glycines
IFLSFFLFINFRLFSEFCPTVSAYPPIRFPSFGLSFGCVLPLSPCTFPWPSSGVSVRCIAVLTFGLPGLLVVLCVAVKWQIRCFIIRGLCLVPNP

SEQ ID NO: 167828 - protein, 130 aa, Heterodera glycines
MDNRLRFAQEIKDSIRDCYPQLFIDAPIPTKEDIEKLRDSLNLSDQVLVCDKDGEVEEGEHEEDGEEAAMDKDNANEDEEEDGEEDGEDEEEKEEEDVEKEEEEEEEETEQQSTANDEEEAEEMIGEGEE

SEQ ID NO: 167829 - protein, 143 aa, Heterodera glycines
  unsure (1)..(143): unsure at all Xaa locations
YTPDPLPCLSKRNATLQMLQQIPCDAFKNECWAFVALSPSKIVFSVRGTRTSAQLIIELIETMTVXAPKKSFPAGGSVQHYFYTSLDALWSVGFGRKLRELKMLNPQLPILFTGHSLGGAIASLASARFAFENRDFVKSSEIF

SEQ ID NO: 167830 - protein, 24 aa, Heterodera glycines
FFSFFLNSIYFMFVFMNLSEINLK

SEQ ID NO: 167831 - protein, 116 aa, Heterodera glycines
MNGVWKMSLTVFLTVRNFCYKLLSLIFAIPLAVLFGILFGLFSMLSVFVFVPVGRLLSIPFGWLAKFWAVLISAVCDPLCRSFALTFGNVKVTRYGINQDPTAVGVELNLNECVNK

SEQ ID NO: 167832 - protein, 121 aa, Heterodera glycines
LNTSDLFLSPPFGLPLFPFISLSDSGDLIETNFGPKFEFDPAKVQQQASSNFRQNYWDANFCHENLEIIGNKSLIVHYKKNSYDAWRSVFAKYPILLNKDSSNIFYYEILVKNKNYWFISF

SEQ ID NO: 167833 - protein, 45 aa, Heterodera glycines
  unsure (1)..(45): unsure at all Xaa locations
RNMKFGRTTILSIRIVHSMFFLNLLFVQFYKCSLFXXXKKKKKKK

SEQ ID NO: 167834 - protein, 60 aa, Heterodera glycines
FDPLLVDTKAPCNCCHHKAKSGCCSNCSNLGSPIGPSPSLSCAWKFSRVPFTVIVAPVTC

SEQ ID NO: 167835 - protein, 80 aa, Heterodera glycines
  unsure (1)..(80): unsure at all Xaa locations
KRRKSKRKESKVQXKMQKAKQKKQKQKDKPRRLKTQRAQGHIDDEQYREKKKNYKQKKDKQKLKARKNKRKLNNGHQQMW

SEQ ID NO: 167836 - protein, 149 aa, Heterodera glycines
VKMVDSVSGLALPMMRICKVEKCNGTDVVVINDGDSGEQVSQLHKCGFQMLSGAESRPLFMCFNGENIVQQDVGNDRSFVANDGQFMTDRRYPIRDGAQWTIISTDTIQYRFFEALRPVQNEVAPVPIVSSLDMHSTDPTSSSGAYVEL

SEQ ID NO: 167837 - protein, 155 aa, Heterodera glycines
  unsure (1)..(155): unsure at all Xaa locations
VHGIRRVSHSQLRVPVRKVKAFPKDDPKKPIHLTAFIAYKAGMSHIVRDVDKLGSKVHKKEVVEAVTILETPPMVIVGVVGYIETPRGPRPLKTVFAEHLSEDCKRRFYKNWYKCEKKAFTKYAKKWQDEAGQKFIEADLKXIKKYCFYVRVIAH

SEQ ID NO: 167838 - protein, 106 aa, Heterodera glycines
MDAAAYGTHRPFRSASAFSTSTRYYLDADILKRLRNRTGLIGWWCELWTVRYREKSRRIDLLARVLFPLFFVLFNIIYWICYLRPYLAEEMEENFAKGKANEGTTN

SEQ ID NO: 167839 - protein, 106 aa, Heterodera glycines
HLFHSHNNDYIVVERLICPVVFPPRPLFSHPLHSFGRSSIWPIIRAVVASIWRPFPLLIVSFGTVHLCPHGTSIVFGFTTRPHFDDHFICSASCCSISNWPIRWPN

SEQ ID NO: 167840 - protein, 91 aa, Heterodera glycines
  unsure (1)..(91): unsure at all Xaa locations
PCPXPPFPPSFPLPPLPHVPPPLPLFSFFPSSTSASLFSIFSSFTSVFSLSASRSLPFPDGYASMINAQKAKESNKIIESFIFKEDLLFLI

SEQ ID NO: 167841 - protein, 173 aa, Heterodera glycines
HAVLPNISLFKKFGKPPDECLLISLTFSAFAFFCFGWHVHEKDPTFMQPFALLYVASIFAQFPLFFTPFECFLKWAFTLWHFAFCQFLANFVWCIRLAEFAQFTVAKFALFQMVSAQFYADFCHRLIFGSNFAFLPMMVPSVACALFVFFAYLHFILIVFAESVQIHFFKFRC

SEQ ID NO: 167842 - protein, 182 aa, Heterodera glycines
DLNNCYTSFEHKVLDEILHKITPSDSKFVVVSVQVTSKIYKYRKTKTEAGLSYDDAFSRIICKGSEEFNSPFKSEISSVEFLKMITQFAMRTLIREPFCALTSSAQNRPLRQRLFVSGRGIGQGSSLSVALCNLYLGWVERQICLHSPEMGLTNCAITLFCCRYMDDYLIISNKRERVEKLI

SEQ ID NO: 167843 - protein, 178 aa, Heterodera glycines
MGNTCGCADKANEAGNIQVDDRKGNRHGNDDAAFDNFEQGGAKITNYGGKRDVRNALPEENGATSSEHAPNPSFATLLSQMPNYSNPNTTATLQRIGPFVYDQDDHEDGYLPQLGPYELENSAVYIGQWKNGIRHGKGKQIWSDGSQYEGYWKNNMANGKGRLIHADGDVYEGEWFND

SEQ ID NO: 167844 - protein, 177 aa, Heterodera glycines
SLPSKEQLDSNLQFLPHLSSPDERVLLVLNREGDFGILKGRWHGFVRRQTGDKRRKGKSGSAGVLNVELFNLLKNTVQKFQVPNSDGSTLFAIGDAQARLNGRRMHCRTTQTSEYLSCIFGIGTLFILCNPDKVRARSESTTPVSHQCQKWPMTLACGYGRPVPSNRILAAQRYQQN

SEQ ID NO: 167845 - protein, 129 aa, Heterodera glycines
ELFCGLLGGASFGKNVRSWREVQKAANLGQCFVAIDPECFAPTFVDNLQLFLDQTRGLKPRDPSKSVLVPGDPERMNSERSAKAGGVIYSEGQIRDLEKLAKKAKRWHVPLQGKFVAEQKNCFLFVPKR

SEQ ID NO: 167846 - protein, 86 aa, Heterodera glycines
CTISRSGISMIASGIATELLASVLQHELGAEAPALLAEVDENASQLGATPHQIRGFMSRFHLMMPTVRRDNPCTAWGHTGKQFYPT

SEQ ID NO: 167847 - protein, 70 aa, Heterodera glycines
WKFSHLSIRAISKGFLLQIKTFGGRQLANHSQVAVAMGGRHLCLGRHASGHRFRGAPSTAWSARRQSVAL

SEQ ID NO: 167848 - protein, 129 aa, Heterodera glycines
MISTCNNDIVDDNSEFSQDLDGDHQYTVKGEDNDDYCGDVNSLRPGDVYVTNHSNLSAVQVVFHVVGDRQLVEQDISSRHPCINALRNVIRLAPHSGINHITFPLLLVEHMTEVFLHSFLYYISPRPSG

SEQ ID NO: 167849 - protein, 129 aa, Heterodera glycines
  unsure (1)..(129): unsure at all Xaa locations
MPLFPSLNPSPLSIHSISHSKELQIRWFGWTLLTIWLLTVICMTREFWRITNSGRRGGGKQSEEEQNDGRGRKSGNDEEEEQERKEEEEQERRERKGIEEEXKEEEEEEQERNEEEEQERRERKGIEEE

SEQ ID NO: 167850 - protein, 125 aa, Heterodera glycines
FCSNDSQNVSSHSTNQIEIEAKKTEHGSAGLSILEILLLWLSRFSVLEIVLWALVPVVICVFVVVCACVISRRRPSLRNELLRLIDLGHQIQVVDENIYRWKVKIPGPPTSLYFAEELLRERTDR

SEQ ID NO: 167851 - protein, 23 aa, Heterodera glycines
FFFFFIEKKFKRNQKNKTIRKNF

SEQ ID NO: 167852 - protein, 17 aa, Heterodera glycines
YFFFFFSIICNIRLIQK

SEQ ID NO: 167853 - protein, 65 aa, Heterodera glycines
LLLILCFSIFKTAEQQQQPDEKDHRQLLFVQAIWRHGDRAPGKLPYPGDQYYDKYWPRGWGQLTN

SEQ ID NO: 167854 - protein, 24 aa, Heterodera glycines
  unsure (1)..(24): unsure at all Xaa locations
FXITVFFKKIIRLLADGVVNRWTR

SEQ ID NO: 167855 - protein, 155 aa, Heterodera glycines
GDLGRDLNKDPARLVVSERKSLVGTVLSPNTSMDESNNQEKLILHIKKNTNPTPIPIDLIPYMHFRIEDLVKVTCAPEVDANKVIRLIYQGKQLKDDDRVKDIKFKPETVMHIFISEPVQKDVNITTISAELYEPERRGFDKFRPLDLMEEEIIL

SEQ ID NO: 167856 - protein, 117 aa, Heterodera glycines
RGFIGPKIIYIFLPIIASQLDVSIKLETLRNSESVCQSQLANLQQRKLGGCTIKLGMEFHEIFHFFYSQSGFVISSFDVPCPKRCPAETKRHSEKPRECSGWLNIGILRCDRTVIRC

SEQ ID NO: 167857 - protein, 28 aa, Heterodera glycines
FLSIYMCFIKSFLQQLKKSSLQKFAISP

SEQ ID NO: 167858 - protein, 79 aa, Heterodera glycines
DKFEVGLDVQFFAPQEIEVKVSGQDVIIHCLHEIRKDQHGSVKREIHRQYRLPNDVDAATLKSHLSTRGVLTLTASKKD

SEQ ID NO: 167859 - protein, 18 aa, Heterodera glycines
FFFQLSFICHILHFNIII

SEQ ID NO: 167860 - protein, 22 aa, Heterodera glycines
EHSYTKTGVNIESSAKTIKKDF

SEQ ID NO: 167861 - protein, 46 aa, Heterodera glycines
FIHSVALFVLSIPFFIFFLSLLPSSPCFHIFVLSFFFVCFNFYFQF

SEQ ID NO: 167862 - protein, 72 aa, Heterodera glycines
LGSNYNLFLIKAGQIFGKQRTLIVYGEMFDDDQSRRWFVFADDKRKKTGIPNPNSPLMFKSLEKPTNKRAVR

SEQ ID NO: 167863 - protein, 55 aa, Heterodera glycines
IRRKLSIFSVFGDVHMSTFFDQTRIFRRNISENKTGQQLFHCILIMVSAPQRIVR

SEQ ID NO: 167864 - protein, 91 aa, Heterodera glycines
VDILTVLHPIHEYYSRFYVADGQTNQISDTVKDTSKLLCIFLQRLVINQKYAVRLSLLGKNTVNFIKNFINFWFKKRFLFYFFLLFSTKNF

SEQ ID NO: 167865 - protein, 43 aa, Heterodera glycines
FFFFFYHLSSFIIVSIDSDRSLFDHFLIASFSISPFEFAWSTH

SEQ ID NO: 167866 - protein, 79 aa, Heterodera glycines
  unsure (1)..(79): unsure at all Xaa locations
TDREEEGREIRFWWRTNAEEWEKDTGKVKAIANKKNDELMTTPSLSNIKWKEKQRATIHPILLFITAIKANXYXXXXXK

SEQ ID NO: 167867 - protein, 117 aa, Heterodera glycines
MRPALFGDKAMDTKALHLLIRLNARKIKVGQRCSKLDSELNLAPQEPKYLYRAGRPSDHFILLIEGNAVAHFPKNQMKFDVGAWECFGTEILDQMEAQMVNNYQMDKNIGKMHHQKT

SEQ ID NO: 167868 - protein, 71 aa, Heterodera glycines
YRCACVLHHLSTNSRRCLARLSSTSLESSYKSLTFHMRSVHEINVSYEFSFICNHAKTATRKWPRENVLAR

SEQ ID NO: 167869 - protein, 68 aa, Heterodera glycines; identical to SEQ ID NO: 150538

SEQ ID NO: 167870 - protein, 115 aa, Heterodera glycines
RLERDGKLADAHAKFGQLLALCPDHQGALDGIARLDKNDDNIGGTDIELVELSDDEHTDHDDDNGSCCVNDWIAFTGLDTTSAELSVLESIFKLGDAAPSAISTDLRDTLIESML

SEQ ID NO: 167871 - protein, 151 aa, Heterodera glycines
MGNGTAMLQGNFEVIGSAGGIAHFASSAGGESNCSSSSSSVVVHKGKKSKKDKPAQRVRTVLNENQLRILKQTYQGNQRPDTNTKEQLVKMTGLNARVIRVWFQNKRCKDKKVFRRQIEQREKQQSQEKDQTIRSVRAVGVGPMIARFAGP

SEQ ID NO: 167872 - protein, 133 aa, Heterodera glycines
VKVVREYERAVIFRLGRLLPGGARGPGIFIVIPCIDTYRKVDLRVLSFDVPPQEILSRDAVTVAVDVVVYFRISNATISVTNVEDSSRSTKLLAQTTLRNILGTKTLAEMLSDREQISLQMQSTLDEITKSEI

SEQ ID NO: 167873 - protein, 164 aa, Heterodera glycines
QGHNICLAQSFAKNMGLYGERVGAYTVVCKDQEEATRVMSQLKILVRAMISNPPIHGARIASKILSDSKLRQQWLADVKGMADRIISMRTQLREQLAKAGSKRNWDHIVNQIGMFCFTGITPEQVDRLSKEFSIYLTRDGRISMAGITSKNIEYIANALHEVTK

SEQ ID NO: 167874 - protein, 82 aa, Heterodera glycines
TVCARQKRTLVKWFPAGTDTQSVVHFCDQPTVTIFIILMMLPSTHSVFLSPRHRVDARVRLQFGGHENAEDGVVEAAQRVID

SEQ ID NO: 167875 - protein, 157 aa, Heterodera glycines
YLFQQDKPYDVSYDTGDKAMQCGRHNDIFKLWLMWRSKGMEGYRRQINQLMDLAKYFTDKIKRTEGFEMVLDEPEFLNICFWYIPPSLRKQIDNKEKMARLEKVAPKIKARMMERGTTMVGYQPDKQRPNFFRMIISNPAIREIDLDFLINEIVTLG

SEQ ID NO: 167876 - protein, 96 aa, Heterodera glycines
MVESRIKCYVCNSGTKGQADCTEDDHDKLKTFIKQCNPLTFGTFAGEKRRRAEKCAKRVEDETTIVRECAYTGEELDGKRRTGTKGSQCSSNSAST

SEQ ID NO: 167877 - protein, 151 aa, Heterodera glycines
VFVFCAVLSPTSYRHRLRALQRISVPIREKSRLFEFYFGKFSLPHGSFIYLLTRFMPRISHWLIILSRPLDWLSITYPMGNLSSSLRRSMPSVNSSADGTGAGAEHLVQRVGTARHSSFSTEDGAAMCQKEKQQNSVGIADSETKCEQLTL

SEQ ID NO: 167878 - protein, 153 aa, Heterodera glycines
LVMYVRELESPDEHSLVLFNPLRSCFRPTRDELFSAIACQRRSIARLDTERARFRRLNGAQFRVVVRLSGGFLPNFAAVMPQQQNVVNVTAVIANANPNGQNYNRLQRLHADLTETIARLTVEISQLGYMYEQLTEQLEHLTEVPPNPNFNPA

SEQ ID NO: 167879 - protein, 30 aa, Heterodera glycines
QHWFLKPTYNTKLGNEKITGFNPPQRLLPS

SEQ ID NO: 167880 - protein, 145 aa, Heterodera glycines; identical to SEQ ID NO: 125010

SEQ ID NO: 167881 - protein, 118 aa, Heterodera glycines
MRKKEHKVQIDDKHKEPFSFLASIGRVYTSDHEEMPVLRNALPLEPTFLLVSMKRRMLVLEIRKAFVFLLMLILPLFVRICLRFGDIKKRRLCARNGGKSESQLLSFIKKKGSLHSDI

SEQ ID NO: 167882 - protein, 47 aa, Heterodera glycines
RRLFHRKDWIINPLCAESELTDRHAMLRFYHPTHSFSVIFASAVSFP

SEQ ID NO: 167883 - protein, 83 aa, Heterodera glycines
MEHFPSKFVLCLLIAFIAVPCSVLALSAGSRVSMLACHNNYRSQLAKGTADNKSVYKKGAACSKCSDYNGATCDSASGLCKLP

SEQ ID NO: 167884 - protein, 14 aa, Heterodera glycines
EKKPPPPPPPLLKF

SEQ ID NO: 167885 - protein, 37 aa, Heterodera glycines
DFFLLITAPQYHHSLRAPFALMKYSNFSIIICIYIYI

SEQ ID NO: 167886 - protein, 66 aa, Heterodera glycines
FFFFLFPYFFLNFLTSKFKLLTIKNFDHLKCFFQDLNVSYINIPRKYKTFRFVFWGFRFVASSTPK

SEQ ID NO: 167887 - protein, 55 aa, Heterodera glycines
  unsure (1)..(55): unsure at all Xaa locations
FFFFFFFFFFFFFFXXNQSFIKFLINLPFKRIWGKRENRTTNITSKPMGNYVGNK

SEQ ID NO: 167888 - protein, 55 aa, Heterodera glycines
FFFRFVLRFLFKWKSFGTFVVDERKMANSEEKVEQMLCLFSKRFAPPKTFFPSFS

SEQ ID NO: 167889 - protein, 134 aa, Heterodera glycines
MSFGAADSGDFDDYDKNGADEKEFRWPPEFCSDSLCIQPNATAPGGASFVLLPLLTHCLQDEALSQILPLFLLVTLPILWVQLSAARREQRETHCDRSLPRGILIKMRKGITIMLFVLKSLLLVRNCYGWLWGN

SEQ ID NO: 167890 - protein, 168 aa, Heterodera glycines; identical to SEQ ID NO: 143873

SEQ ID NO: 167891 - protein, 86 aa, Heterodera glycines
  unsure (1)..(86): unsure at all Xaa locations
FLYTLKALLVCINNEDRLRMISMTDVGYVGLVLERLIKGVLGIESTAPLSRDDRRAXVTFCTTTWITTDRSTVHIPLPNIWANPTY

SEQ ID NO: 167892 - protein, 28 aa, Heterodera glycines
MFVVTMAYCFDSYCISLRCSLFLVIFPY

SEQ ID NO: 167893 - protein, 103 aa, Heterodera glycines
RKKQKPVKCRMFGYVPFASFSNDWSAQFSPPFALPTQPKSRPSSSNSPPSAAEEDENPLPAAFRIGNESESSDESGAERSEHEEEVIRRSKQIRNRERWELLK

SEQ ID NO: 167894 - protein, 127 aa, Heterodera glycines
SCRFLFNHVRLITLMDICAGLRSTALLELCTRIRPYGLRALVLFRVGVRFLVNEVRDAEVCNGIAAGLAFLSTTVLDLCADAAAGAGDLDVMARVASPPLPADGTALAERIKEAEAREEAALTVDAD

SEQ ID NO: 167895 - protein, 39 aa, Heterodera glycines
GLIFSFFNFYSLFLSFNIPSHLKVQYFFIFINCDCWKMC

SEQ ID NO: 167896 - protein, 29 aa, Heterodera glycines
LFSILNSNYNITKCIWPILLIKIFIMSLN

SEQ ID NO: 167897 - protein, 126 aa, Heterodera glycines
PEEKPEAPAEGVAVVPEAKKAEETKERLKQEEKPVEVPPSPAEKKRKEAEEKKAQKDAEAKAKKDAEEKAQKDAEAKAKKDAEEKAQKDAEAKAKKDAEEKAQKDAEAKAKKDAEEKAKTDAEAKA

SEQ ID NO: 167898 - protein, 146 aa, Heterodera glycines
CEEDGIKVPFHLHPFTIKDLDILSMASRLRTCPQLKEIRYLHPDFDKEEMLAYFESEEQRLRANESTTGYIESEIVMVAKTTGSKLCSALGSDSPSPMSNQWSPGDIQQGNSMEISDEIVSMLSQNHLEAPNVESLLGGLQIGQRM

SEQ ID NO: 167899 - protein, 159 aa, Heterodera glycines
  unsure (1)..(159): unsure at all Xaa locations
KENYVQMESKDEAVFQQLKGDAQLGGTYYPLQGMTNDVQNQLIADHFLFKEGDRFLQEANACRYWPTGLGIFHNAKKTFLVCVNEEDHLRIMSMQNGCNVGQALERLINGAXDIGSTSPLSRDDRLGWLTFCSTHMGTTDRAKGHIRLSKISAKPDFKS

SEQ ID NO: 167900 - protein, 44 aa, Heterodera glycines
ELAKRKPVQMIRQKVRGRNRQRSFRDRQKSLRAYLLRQQGKKVK

SEQ ID NO: 167901 - protein, 49 aa, Heterodera glycines
  unsure (1)..(49): unsure at all Xaa locations
NDDAEEVEEGGRRXXXXXXXXITGXTRQARKPNPHPGHLGILKIKKIYF

SEQ ID NO: 167902 - protein, 178 aa, Heterodera glycines
FGVYCIFLRLGDIPEIHTKPILGIEAEVSSDSEGASVALQKTETVDAIVSQTDCELYEWETTPFCQGAEARLFACTFLRRRAVMKERFVKRYRHAELDARLAKERTRAELKAILKCQEIGIRVPSVFFVDPLKNRIIFELICSSGSSDRAPTAKHFLDKLQRDESASNNGEQFAAQLA

SEQ ID NO: 167903 - protein, 139 aa, Heterodera glycines
RTAICGVENELKEYKMLLNKFNSGATRAQLFNEHAFRRVVYLNNLTPRAICPSIFNVVFNAEYVAGNRKIARAQIIHFVIREVLALTRNACVDIDIYLDTLLDYLSSKINRTEIVIFLKQRGIQNPHHFLITQPISLRR

SEQ ID NO: 167904 - protein, 112 aa, Heterodera glycines; identical to SEQ ID NO: 158708

SEQ ID NO: 167905 - protein, 46 aa, Heterodera glycines
ISIHEQVMENTKRMTFRSQQVALQLEKIRIDSRKGATWKKGEREIV

SEQ ID NO: 167906 - protein, 136 aa, Heterodera glycines
SFVKNPQYWIHIAANEQNRSEFMVISLLQKYRREERRVKLQIGFSVFRVYESSEFLKAENFPLPVYAETPAFSRVREATHHFQLEAGNYVIIPSTFGRNEEGEFLLRIFTTGTIGMYNSTPKNLCPEQRYNFGVRE

SEQ ID NO: 167907 - protein, 94 aa, Heterodera glycines
VEITERAMAHSGTAEVLIVGGVGCNERLQQMMDTMAQERGAKLFATDERFCIDNGAMIAQAGWEMYRAGLRASLDQCTYTQRYRTNQVNVCWRK

SEQ ID NO: 167908 - protein, 150 aa, Heterodera glycines
FSPIHRIYLAQERMSSGGAKVIPGGVVAVKRFCPRALCAAIGCWQFAAVCCALLMVQASIVTSMHIKDTQNDEDVLRRHLQFRQQQQPIFALPLDVFDASPTAVIGLKPFAEHLVFEKRFAPREMGKRERIIMDAMGGNDYLIKRSFGRK

SEQ ID NO: 167909 - protein, 16 aa, Heterodera glycines
FFFFFGLKFNRQFSSY

SEQ ID NO: 167910 - protein, 141 aa, Heterodera glycines
FLKMHRIPFIQLFILLINMIGIANSKDGIKNLFVGKKNNNDYDKCSDQFHYEVIEDGTTEEEDMKKAIQIGKTFFWREMIAKWECENEDLYNNPQKIGKKSIKKLKRICENWKMKALSADAFVKSLKCKKKQKYFMVTLLI

SEQ ID NO: 167911 - protein, 145 aa, Heterodera glycines
GKIEPANGLNTAMWAPQGGWVVVMGVNTSSGIVSFIDATGAEANKAETIEHTSLSQGSWDPTGRYFATCTFAGKSRYETGYRIHSFQGRELRRKAVDALLRLKWRPRPPVSLSEQKVRETRKSLKQLSAKFEEEDKREMLKVSKE

SEQ ID NO: 167912 - protein, 131 aa, Heterodera glycines
YDAIMRECVRRKYFFWRNVLKERPETKEKQQSKEQVVQAVRGYKLPTQLFFTAAGIGIAYMLGLYNNPMSYRIICLGTGLLFGTFYGEFKYATEIFDSLPKLPDKALEKERQDIYNYCFSLDVRLIADALA

SEQ ID NO: 167913 - protein, 152 aa, Heterodera glycines
DEEVSPSGSCAEEEEEEEDEQQHQGGTGPPMLNVLDELVGQLEGLDIDQQQEHKMGLSDHLHQQQHHQPMPPAPRYADSWLDNISLVPSDSGSACLYTGANNVCAAAVPMASPFQQSLPPSSLVEPPCSDYMTVPPMLASVDLAMPAEPSPL

SEQ ID NO: 167914 - protein, 37 aa, Heterodera glycines; identical to SEQ ID NO: 126029

SEQ ID NO: 167915 - protein, 150 aa, Heterodera glycines
MKNNLEEGLNTEQRNTNQRKDQSSSTASSSRSEQTSKIEERLSPDQKHDKLNKNDRKTSTTSKKDETKLKIKPTFEQNQDQNATRSSSKTKQKKGNEKPINDQRPSRNLEQTTSIASNSDQAKSKKEINLANRQGSGQISQNATAASKSD

SEQ ID NO: 167916 - protein, 79 aa, Heterodera glycines
  unsure (1)..(79): unsure at all Xaa locations
SRHGKWSGQVEQKERGKVRQSLVVDVLALHAHLFYFLKLSNKSGSFSHNHFPLLIFYFPCFFICNKFVYFFXKKKKKKK

SEQ ID NO: 167917 - protein, 78 aa, Heterodera glycines
CFSNCPSADVVLVVLFVYVVYKLFFARRHIPPPPDVPQVEPLGEQDMTVEQLRRYDGVQDEHICMAICGKICDVTKGR

SEQ ID NO: 167918 - protein, 73 aa, Heterodera glycines
NNYLIIFLENASPPPIMNVHKIVLFLFVLLSFCAAGVHCHSDNDERNKPKSALKKQKDKTKGGNPHTPTRRKM

SEQ ID NO: 167919 - protein, 151 aa, Heterodera glycines
MLQRAGFQPAPEDLPENWPDKAQIESIKMAWEAYNKSDAIVVILINEISETIFDANFFETELDRLSNGRIKVERITLNDCAHRCKLDENFALRLDGREVAVVKSRYSVLGLRARGSELNILKNLRLMLERSLAIKIPSTFIGFSCSKKVPQ

SEQ ID NO: 167920 - protein, 135 aa, Heterodera glycines
QKKRISKTGEGEEEEGEELIQQEDDLQSVESQNENCRADFCLDRHDHQQNGNAADDDDDDDECCDQEKLKLIEQQETMTTAEAPLEAKGRPRPAMLQIHTVQPYQSAEKVKSPAPNAAADEAFLGQMREKKKWPV

SEQ ID NO: 167921 - protein, 166 aa, Heterodera glycines
TCVSPNEVDANETLSSLNYANRAKNIKNKVVANQNKSSTLITDLRIKIQLLEAELHEWKTGKRRRSGHIAVTEPEDKNSTEQVFGCLARLDEEEEAEDADNEEEPGEMEHERICTDLDKLQENISSKERLMANYEKELEKIKQEINRLEETKKENKQEINRLEETK

SEQ ID NO: 167922 - protein, 163 aa, Heterodera glycines
AGGDAAMQRQHQQQQQQQQNSLCPQQHMGMMCENGWRASDNAIGDPSLPFPTGQLGKRNRAVHEIHIPSGSGGAPLLHSQLRKMRISTGASVPSTPNPTTSDQNSPGPTEKRVGGVGTVLGMSKRISLPENLEFQPQMLLNLKQSIHVEKQLTSNSDTSDSAS

SEQ ID NO: 167923 - protein, 11 aa, Heterodera glycines
FEFCFYSTLTI

SEQ ID NO: 167924 - protein, 51 aa, Heterodera glycines
  unsure (1)..(51): unsure at all Xaa locations
PPCPPPCPPPCCCCGGGGGGGGGRPIIVNCGGGGGGCGGGCGGGGXGCGXX

SEQ ID NO: 167925 - protein, 100 aa, Heterodera glycines
WVLSSCCFTTSSNCGFTFKSPPTNASTANAIIFHFSHNLTNSSADSSSPISSGFFIFPISQCQWRQMCCEFVSLFQCLSSPLCHNSQSFQIGTGPSHPQK

SEQ ID NO: 167926 - protein, 80 aa, Heterodera glycines
SPHGIFEEHHLCSCCWCCSPNSLRFPPFLLGHKLSVVRWSSLARGKMPKMAKQIGAKQRQICPQICSLFYFMWIIVFILI

SEQ ID NO: 167927 - protein, 131 aa, Heterodera glycines
MADYDYLIKFLALGDSGVGKTSFLHRYTDNSFTGQFISTVGIDFKEKKVVYKNARGGFGGRGQRILLQLWDTAGQERFRSLTTAFFRDAMGFIQIFDITNEQSFLNVRDWLSQLKIHAYTETPDIILCGNN

SEQ ID NO: 167928 - protein, 161 aa, Heterodera glycines
KADEFGSPLKLKRPTDGYTKLTHERADETQSSSAGNGTEFGRSVPSSSDLVLLVRAPSPSLRQLPFLSPVKNWGGFLSPKQTVETVSAISEFSADLFKTPSPARLGKRPIICANVGQLLTPEKSTISMAEKSDESSQLNEKGAETEMERELVEKKKRTQRK

SEQ ID NO: 167929 - protein, 146 aa, Heterodera glycines
SLFFLHRSSNHFSFSFPLFLRSHFFPLITFLLRFSYLITFFLRFSFDHFSSSIVPLIIFFSFPLFLRSHFFPLITFLLRFSYLITFSSAFPLITFLLRFSFDHFSSSSVPPITFLLRFSSLITFSSAFPLITFLLRFSFDHFSSSS

SEQ ID NO: 167930 - protein, 147 aa, Heterodera glycines
  unsure (1)..(147): unsure at all Xaa locations
YLQGGLQGVGLKTAEEVFTKASSHATLPSVLVRLQLYTNKRLKVKVDADFVDAFVRAENTFLYQIVFDPLKREQRPLNAYPETGEEKENLLDNEKKSXSPRNALRLALGNDDLSKSSLEDEFVLPSEIPVSSIWNSNYKKVLETEKD

SEQ ID NO: 167931 - protein, 94 aa, Heterodera glycines
ALPFINKKHISSKFKAINMSFCHFIGRAFRVSLCFSFFSAFHPSAVAYGVVCSWTNLVASSVNSFAPGRTRSSTNLPAPVSSLIWLALAPTSFA

SEQ ID NO: 167932 - protein, 109 aa, Heterodera glycines
ISRFSIPESRNFSGFLGSRFSYRFSGSFLGLVSRFPVKITSRTALLHYPPFSSSSSASFPPFVFFLFLPLFILLSRSSFLTLPLLASFPQFLFLPTTVGPTSLSRTIIF

SEQ ID NO: 167933 - protein, 152 aa, Heterodera glycines
MHSFLVLTILFANLATNAFGQQWPKATSEETVKATIKVSGGVKDFGFKRLTASSALGSGDQSEGQKALIRAEKNAVIKNLIIGQNGADGIHCYDGCTLQNVWWENDGEHAATFRSSIGCKEYSFTDTRGGVKNAKDKVFQMNGGGTLTIKNF

SEQ ID NO: 167934 - protein, 80 aa, Heterodera glycines
YVAYCRNSDDLDWYEFDDANVTRVNSLEVLSQEAYILFYRQKETLEDEEAMEEDEVLEEEEEWVEANSSDEMETEGGNGT

SEQ ID NO: 167935 - protein, 120 aa, Heterodera glycines
NNYNVIKSGNVKMTITNPNYDKPLCLKGLSQYEALPSSLCNFDLCNFIGRNLCELLQRPGNHTVREMEQKAGWNATVVIPESPRIFGIPFVDLFAGEFNFEFLMKTDERKERKTALIENQ

SEQ ID NO: 167936 - protein, 24 aa, Heterodera glycines
FMYKNHYNIKMINGIKRINALIYR

SEQ ID NO: 167937 - protein, 99 aa, Heterodera glycines
TAAIRETMEEAGIDVNKLRIHKEFMYEMRYLSKSTKYGEEQKKVTYWLAESTDPEVIVMLSDEHQNWKWAELKSALELAKFDEMKKLLNKAEMFIAENL

SEQ ID NO: 167938 - protein, 104 aa, Heterodera glycines
LFWPCANGARGVPFADAYCEGAPPKENEHSPRPPGGGVPLRGPGGRSRDNPALSETNFFLFWLAFFPKVPTFFKCNISIDRKSIQILQKYYFHIIVLIKFVLFT

SEQ ID NO: 167939 - protein, 128 aa, Heterodera glycines
  unsure (1)..(128): unsure at all Xaa locations
MRTFLFIAVVGLMLAVILENVNATGKNSPSKGKPSSDSTNHKKDHKNEHPKYDSPILAGSSXVRKKENRRMPIRKKAASHHVPVTPGKVXEQSLKMVKKLCGTMMPTMNKPKAVVVDVEKKLWYHHAF

SEQ ID NO: 167940 - protein, 45 aa, Heterodera glycines
KCLKRFSHSGSYSQHMNHRYAYCKPFMQQRQRAEERTPSKDENTE

SEQ ID NO: 167941 - protein, 49 aa, Heterodera glycines
QNQNMKFETYFSFGPRLKNPRLFPRRSNNIVNDKYLVNISKDMVPPARA

SEQ ID NO: 167942 - protein, 72 aa, Heterodera glycines
SFSKHPKSRGRLLLNSVVGRALVVHEKADDMGKGGNEESGKTGNAGKRIACGVVGVIREEPMKVTTDQTNGM

SEQ ID NO: 167943 - protein, 39 aa, Heterodera glycines
FFFFHIKIYQIAISNGLSSRITSLFPCRPIMPNRHTSSN

SEQ ID NO: 167944 - protein, 138 aa, Heterodera glycines
MVGFSRAELRVKKYRITVYDLGGSARIREIWPIYFAEVFGVVFVLDASAASLISENKKMVDSLVGLPDLLGKPILFLLNKKDLPEALDEMQFSERFNLHSMAKQNRTDIRVEGICAVKGTGKEIDQVIVEGLEWLIEV

SEQ ID NO: 167945 - protein, 47 aa, Heterodera glycines
MIIHQHDRRFPPMMMHQHDRRFPPHCFCWAPWTCFVDSMHHHHQNHL

SEQ ID NO: 167946 - protein, 120 aa, Heterodera glycines
SKKKNPLNYREFMELLEQTNCIYQTMSNSAICNTTRIFVNIQNWVEFSMVCGSFVAIAMNVLIIYCALRIFNRKNRDTIHVYIISMTMGDLILVICQFLESMNRLTPVQFISSSYYACFL

SEQ ID NO: 167947 - protein, 96 aa, Heterodera glycines
MNVIQSKTVIKKKSQWKPLEIGSKSERLRNKVRNFQSKTRFFVQQRKFRTQKNCLSELYRLHSELQIGCARPQKIRPSLLTPMDRSGKGRDGELGT

SEQ ID NO: 167948 - protein, 161 aa, Heterodera glycines
MMLFILLVITFVQIGQLNAGICTFPNPSKSVTVQSMMTVSSSTDYKNTLFVGGSGILNGACDVNNDKLKYLMTLKNGVTIKNAILDTPGLGIYCEGNCVLENIYYKRLCYHATGFGYKSTSTSYTYQVIGGAGQGSPDKYFTQSGKGTTIIKNFCAEANTA

SEQ ID NO: 167949 - protein, 175 aa, Heterodera glycines
QIEGANGNVTLALVLPLNASPGFSLRRAIVFDSSVRPVGCSCASSVLNVDQQIDYAGFRVLFEPFVPNTAQFPVDDLAEQFVLVPIVLLPFRFRRPSRAPFAFFGISFRFLCQMGSLMVRMRKGGTREWTQQRSGHNGRAAAAAKGRGGRSGRGRADHVGRGGRNFLARHPFRNC

SEQ ID NO: 167950 - protein, 171 aa, Heterodera glycines
VFVNVDEFTDFPRPLFPNFIFIGGLELEGTPELKALQEPFKSELLKGRKGVVFFSMGSAVKTDVLPAPFMKNVIGAFAELPDWHFIVKIEPDDEQSRRMAENVPNIRLTSWAPQPAILSHPRLRLFITHGGYNSLLEGAQGGTPVLSIGFFADQRKNALVAQRNGWGKRDR

SEQ ID NO: 167951 - protein, 81 aa, Heterodera glycines
MLPMDGDFVVRLHQRTPPLRFRFFNLLSVPSQVQAESIDKVSRIAFPTMFALFNIVYWSYYGRKAAETSAELHSSGGMMIQ

SEQ ID NO: 167952 - protein, 47 aa, Heterodera glycines
TSPIYSFVNEQKSIQPHSNGIIPNPIFDHIIASINQSTNQFISSVCC

SEQ ID NO: 167953 - protein, 163 aa, Heterodera glycines
GKLEQKVRELSERCAEAERRSIELEAKMADKTEQTKTGQSEAIVENVTVAKRFRAFDRQLLQQKSDVDPITVLCSETFSLGLQKSDNGEGNSDPSECPREFSTSTPVPSFCSKSESSVSLNILQNADTDCEIPHIMANEGNLCDFCVTSRKELDYFKSLLGHL

SEQ ID NO: 167954 - protein, 144 aa, Heterodera glycines
ENPFQSLNSPDDDFMVEIGDRKVALSASRLRCFSPVIDRMLSVEMREKQQRSVTLNELSIDMDQFLDFLLYISPNALSQPILPNPKNVLTLLSLASYFQIDWLKSRCETLLFNCVEVPLIDRVNLIEKYGLTNLKNFFLNLNVH

SEQ ID NO: 167955 - protein, 41 aa, Heterodera glycines
RLQHGCNDGCSCLQNQHIILVSRKFREILYPFIDTTHSCFY

SEQ ID NO: 167956 - protein, 87 aa, Heterodera glycines
FLKKNFFFGNLCHFQLLFRTNSNFLFLKVRTSSTAFVLSILCGTSIELCTPKKFFQYIGTYSKVTHVPFTINVVMLNDSHQMQRSAG

SEQ ID NO: 167957 - protein, 149 aa, Heterodera glycines
IYFFFPFSAPTASVKMLPTYIRAIAVGEEHGEFLALDLGGTNFRVLLITLKGDCRSTMRSKIYRVPDHIQKGTGTALFDHIAACLAKFMEEHKLTGRPKLPLGFTSSFPCQQHGLTSARLTNWTKGFKVKANGWVVFGISFGVRRARHD

SEQ ID NO: 167958 - protein, 81 aa, Heterodera glycines
MGSERTEYQQMLRRSFDGMLERLPTFFDGEKFLPDVTSQDGKAALGGANSQLVNGVLDRLSQIGGMAAEMHIFDSISGLSE

SEQ ID NO: 167959 - protein, 170 aa, Heterodera glycines
CVFRAFSAQISCSFADVLVEVVDYVQQIAHHTNGGHFVFRVLLNAFPHPDVRSLRLYVQNVMVLQERVQLSNSMLKGRHNLRREFCAKCKRRIIHNFPHFRLNFLEEWHQPIVPMARPLFRRGNFVDGTEEHRSGVFAIVATKQRKDFLFDLLGDSNHMLIPLLLNKFRK

SEQ ID NO: 167960 - protein, 99 aa, Heterodera glycines
IKKYKNLFLFLKFNILNAAKNKRLKAFCARSFLSSILCFFFLAMASNHHLRRCCHFLLRVLLHVLHFRFSFFHLLFLHFRFFVVSFKIFTISRWICIDD

SEQ ID NO: 167961 - protein, 24 aa, Heterodera glycines
MNCFSSHRNNGTYIYIYNTSMVLF

SEQ ID NO: 167962 - protein, 29 aa, Heterodera glycines
DLVIYWHNLSIKYQNLAKKQTSRFVDLRL

SEQ ID NO: 167963 - protein, 142 aa, Heterodera glycines
MALENGRTMNGTQQNNKTAIRPSEFEDDTESRDFENLSMSVSEASSEVGSVSIQDGAMLNQNERPMLENGITKRNVRLKSDLRISPASSGSWERAIRPVVNKHHNANAASVGRRPAANTQRSSVCWYCGVKGHAAAHCQKKR

SEQ ID NO: 167964 - protein, 107 aa, Heterodera glycines
RKCEKTHILTNKIIMTSCGFYGDVLQLRRILELRINHFEFIYQRPMSLDQCGEMLSRTLYSRRWWPNECHDDVGRGRSIAWPIRESRPNSVQGHRNFNQIEFKIQTQ

SEQ ID NO: 167965 - protein, 142 aa, Heterodera glycines
METLLDKTIFSVIDPPNLRINLPRWFTFPTPMQTFFFILLTYFLVSGGIVYDVINEPPSIGSTVDERGNSRPVAIMPYRVNGQYIMEGLVASLMFCLGGLGIIILDKCTHPLTAKNNRMMLFGLGFSLLCIGFFTTRMFMKM

SEQ ID NO: 167966 - protein, 54 aa, Heterodera glycines; identical to SEQ ID NO: 140431

SEQ ID NO: 167967 - protein, 24 aa, Heterodera glycines
NQNYSIKIIDRKINFLHSLRWNFR

SEQ ID NO: 167968 - protein, 100 aa, Heterodera glycines
LAHCFYGQISFQEFLCIARANPLSLSLKSVFDELDVDGDGFITRSELRMAFQQMGHALNDADIKAIYKRVDKNQDGKINFKEFCEMMTRGSTSNSSNSNS

SEQ ID NO: 167969 - protein, 39 aa, Heterodera glycines
TRKLKCLRSIIHPPPNGSIDPAQFTLILRSDVPRRGRVG

SEQ ID NO: 167970 - protein, 18 aa, Heterodera glycines
LFASLGFFQKCLLIIFRD

SEQ ID NO: 167971 - protein, 54 aa, Heterodera glycines; identical to SEQ ID NO: 158706
  unsure (1)..(54): unsure at all Xaa locations

SEQ ID NO: 167972 - protein, 30 aa, Heterodera glycines
FFFFFFKKIFFFFFFFFFFFSIGYFYFLMR

SEQ ID NO: 167973 - protein, 39 aa, Heterodera glycines
CGKRTRKRQKILTRCCGVPKYSKNSVFNPVVLILHYTCF

SEQ ID NO: 167974 - protein, 136 aa, Heterodera glycines
  unsure (1)..(136): unsure at all Xaa locations
VDDSPLQGIPRSRTIIAMSDPNHGKSSPVYQPLSGKDKHADFASVARVKPRTSKGXHRPVIAQFRAAEHRKSLXEVVPTEAMSQLFSXARVSLVIGINQTNRSTNXERPCTTIHRIMKKLSICQSLRCPGRVSSWI

SEQ ID NO: 167975 - protein, 64 aa, Heterodera glycines
KWQMNNSSLSTSFFCHSHLFVLIQRSLSSKNSSILSQFFPFCPRFYGPCCLIGCRSFDHQKNNG

SEQ ID NO: 167976 - protein, 74 aa, Heterodera glycines
  unsure (1)..(74): unsure at all Xaa locations
HPCPRGRSLRFLHPQPFFYSFCWTFRSIFFTILRIFNSSIASLINFVXGKXXKNFFFLKKKKKGKNKKFFFFIX

SEQ ID NO: 167977 - protein, 37 aa, Heterodera glycines
TFPQRAYPVLASVSRRYSEPKGRFPRVTHPCTTKAEA

SEQ ID NO: 167978 - protein, 22 aa, Heterodera glycines
FFFFFFFKENHFYQILYNIKTL

SEQ ID NO: 167979 - protein, 39 aa, Heterodera glycines
PVDAVIVRNNETKSSPSPFFLFLLFTDHCIALNFRFHFT

SEQ ID NO: 167980 - protein, 41 aa, Heterodera glycines
MSTLTISNNSRGGRICRSIPILLPLPIRESQIIFFMMFHKI

SEQ ID NO: 167981 - protein, 25 aa, Heterodera glycines
DVIVFRCKQPLLNVNIVCGLVNLVW

SEQ ID NO: 167982 - protein, 1 aa, Heterodera glycines
F

SEQ ID NO: 167983 - protein, 49 aa, Heterodera glycines
  unsure (1)..(49): unsure at all Xaa locations
XXXXXMRWYLWYNEKNAFKRITNAGKIRSNQIRTVNNINLTPILGIISC

SEQ ID NO: 167984 - protein, 19 aa, Heterodera glycines
NFSNLLNQIKLDLTAKKKK

SEQ ID NO: 167985 - protein, 63 aa, Heterodera glycines
MLTNEWNVSVNANLFIIIHPSFLSRPFTALICQSMQISVAFCLICLIPPPPVFVHLAARIIYK

SEQ ID NO: 167986 - protein, 47 aa, Heterodera glycines; identical to SEQ ID NO: 127979

SEQ ID NO: 167987 - protein, 57 aa, Heterodera glycines; identical to SEQ ID NO: 139256

SEQ ID NO: 167988 - protein, 104 aa, Heterodera glycines
KKYKNLFLFLKFNILNAAKNKRLKALCARSFLSSILCFFFLAMASNHHLHFLSFPSSLPPLLLLSFPSSLPPLPLLFFPSSLPSLPFFRCQLQDLYHFPMDMHR

SEQ ID NO: 167989 - protein, 80 aa, Heterodera glycines
LIRQVSCYTLLSGFRLPWPPSCCLYQPTPFMGSNERALWHLNSTFGSSHIASSAYQKWPTWSSNIQRLGSESSNPGFIPI

SEQ ID NO: 167990 - protein, 122 aa, Heterodera glycines
DFARANTLNIHQRIHTGEKPYQCHLCDARFTQDGQLKTHILIHTGEKPYKCTYCPQKFTRAGNLITHLRRHTEKKPFMCSHCGKQFAESSNLQIHLLTHYRKRKANGQLSNRMNELVPPKNG

SEQ ID NO: 167991 - protein, 119 aa, Heterodera glycines
PVTCSTVSASKAPDVSHAVRLTVPEVQAKQRPVSRRSLSQVREQTSAIVQPPMRFGNTSRRTVISKGTSNEGMTVSSGPVTRSTVSAAKASGVSHAVRGICVVRNMPTNNKKQQTKDKQ

SEQ ID NO: 167992 - protein, 167 aa, Heterodera glycines
AAQRARSMQRQTQNAAARQPSRAQRQSAEERHGSSSRESNINAKLEKIDQMFEQGIALEVIERTVNVPTVELKCRFARLYLMKAFALPKEEWKKHGVIDKGIGFANEALAIDPTHNDALKYLCMLMGLKIGQMQKSLTNAKKIVQLTVELDKLLQRADQHDPEILHA

SEQ ID NO: 167993 - protein, 26 aa, Heterodera glycines
  unsure (1)..(26): unsure at all Xaa locations
VPFIXIYLHKISXRIKTLTILIVKSV

SEQ ID NO: 167994 - protein, 64 aa, Heterodera glycines
QCYNKGVIFGHLYFATDSTKRRPRHRESKKNVQMGKKYQPLRMFQSVQKQHSRCPTKGSSISRI

SEQ ID NO: 167995 - protein, 50 aa, Heterodera glycines
CIFKLGNQIEDGGFSPNFPLSYCFFHIYIYAFSINKILILKKKKKKKKKK

SEQ ID NO: 167996 - protein, 37 aa, Heterodera glycines
GLINAALYLAWLEAMSAELPPTLMLRGNQQSVLTFYS

SEQ ID NO: 167997 - protein, 184 aa, Heterodera glycines
EPLLQAKENYVRQGALVSLAFVLIQQTTSTCPKVADFRKTLIKVVGEKGEDTITKFGAVVAQGILDAGGRNVTLSLHNQNNQNDMPSVLGIFVFLQHWHWHSMTHFISLALRPTCVIGLNKDLKMPKMDFRCNAKQSMFAYPQPIEEKRKERMEKVETAVLSTTKKKANFGQKAEDADGKAEEK

SEQ ID NO: 167998 - protein, 61 aa, Heterodera glycines
WEPMDGTEEDEEAMEQLVLNAQNLMQSVKDTVRAAEAASIKIRTNSGLRLRWIRKPMWSNY

SEQ ID NO: 167999 - protein, 48 aa, Heterodera glycines
FAEVPSHFRSNWSSYQVELLALLIIFVYALNYAYGKSKNHSIAHKWFM

SEQ ID NO: 168000 - protein, 105 aa, Heterodera glycines
NKNERKRKKERAKLVEISLGKEEKIWTKWRGGKWRKTEGPSNGEERMDELGVIYATEIADLTVLEMLRQNYSVTFDRVFSVHGTEIRQQIYIICNEEDELDAETV

SEQ ID NO: 168001 - protein, 108 aa, Heterodera glycines
DHLQYLYFCAVFFLYSDGMRNCCRACRLRRCFEAGMRLDLAPNAHGNDWPYAELKSAVSSANFLERPRPTKRAISDAIISAIPTTSFLSSPSAFDAGLLLSPLPVTNR

SEQ ID NO: 168002 - protein, 27 aa, Heterodera glycines
  unsure (1)..(27): unsure at all Xaa locations
FXAILVFWLLFVGKQLNGYLIIFIICP

SEQ ID NO: 168003 - protein, 24 aa, Heterodera glycines
SSARHFFSNVCKYKQFIFQYKIII

SEQ ID NO: 168004 - protein, 135 aa, Heterodera glycines
SAKQPLFLTWRNPELLAHLTMPCHQLIFKCGDDMRQDMLTLHVMRIMDAKWKSQLQQDFCMTLYEVLPMGKNIGLIHVVPDCQTLFQIQCESKRKYTGTSLNMEVDLLNKHIYKKCCANDSKKYLECVDRFTFSL

SEQ ID NO: 168005 - protein, 73 aa, Heterodera glycines
DRIQSNVFRYMGNNMLAYRSCDELAELNLRMWMSCCDETCSARASTGIDSANDGNEQSRRRKRAVHLYANGNN

SEQ ID NO: 168006 - protein, 153 aa, Heterodera glycines
NTMGGMPTLQAQPNAMGGMPMYYAVQQQQPYAQLQFVSQQQPATVRLGTPSASVKPGTNQPMMPISPTQSVLVRILKKRENMDENPCPPLSSPADDLTVHIGNREVTVSAAWLMCQSPMVRQMLSVEMKEKQQRSLTLNELGIDMEQFMDFLE

SEQ ID NO: 168007 - protein, 156 aa, Heterodera glycines
YDLAKTVTDNRFDLVLHKPEHFVNAETDLWMGNIWADLTKIEPSSTKDKVGGMRRMCGSIPLFTNSLEHLLYLIFNRYDRHEFQQGMFLVKAEFGQDWFTPIMQHPHCILRQPVRQVALRRNSTAGTEYKNLTPNVHQSFVLFYLGPNVPQFCATF

SEQ ID NO: 168008 - protein, 83 aa, Heterodera glycines
FCRAFSFCFVHYLIFPPIVLSEDEKPNNASARLRERVQLQKARRGHTTVGRITQHYSKSDQIRRERRPLTLRNSSIWHLYARG

SEQ ID NO: 168009 - protein, 128 aa, Heterodera glycines
MLPTPTHLFVFIVFFLKIYLLSARVWARSQCVLARGRVICPTDPDSHFNVQIELMDSDALPWETDDVMGSATTDLLGNFSVRGCASDSGLWNDPDPYLLITHRCPQMGHDISVVKRKHRIPIDRIYLP

SEQ ID NO: 168010 - protein, 62 aa, Heterodera glycines
KRRTDHSGEAGAAQNVRAEQKLLEHEEILTVFLCFVIWSKFDPFLFYLFIFWSLFLPFPFKY

SEQ ID NO: 168011 - protein, 72 aa, Heterodera glycines; identical to SEQ ID NO: 167942

SEQ ID NO: 168012 - protein, 164 aa, Heterodera glycines
  unsure (1)..(164): unsure at all Xaa locations
LDQVNGLPDMVFACNSGLFYRNKLYLSHFRHAQRIGEQRHFADFYKGLGLELYGADCAEVFEGGGDAFFSDERTLWAGWGGPRTNRKAYEHIRKMGDFETVPCELVDPRFYHLDTCLCPVGIDSALWFPPAFSEKPKKKXLRRLPRAIAVSEXEAMTFVCNAIT

SEQ ID NO: 168013 - protein, 142 aa, Heterodera glycines
LQYLGEKFGLVNETAEEKAICAMLAQRINDHFEYLKPYVNCLLGLIPANKLPALAEKCLRPCITEDFGPMFERQLEANNTGYLVGDKLTWVDFYVASFADLALTFGRFDILDRFPRVLHHCRAVFSLPQLQQHIKNRPDTLF

SEQ ID NO: 168014 - protein, 172 aa, Heterodera glycines
MQISCRRRALLRSAIAAVGESFRIVEVGARDGLQNEQKIVPTATKVTLIDRLSDCGLKTIEATSFVSPKWVPQMADHAEVISRCKKFAGVSYPVLVPNLAGLHNAIKNGNVREIAVFRAASDAFTRKNLNCSREEGERRVGEVTEGAVANGLRVIRCPYEGQIKANTVAAMA

SEQ ID NO: 168015 - protein, 152 aa, Heterodera glycines
SKLKVLSSSADFSSFLFLALLFDFSFSQPTIQQKSIQELLNTPTFLPTAEKHDYFVAPFLQQQKQRWLSVRPFQEFRRSPQTADLGLLLQYLDNKRNAPSLMEDEGNGRHGISGSPLGTMRFGKRTFNSPLGTMRFGKREYNKSPPGTMRFG

SEQ ID NO: 168016 - protein, 145 aa, Heterodera glycines
VANPLIQKSIHFWPTKSNFPSLFDSQSIRHSFLLGNQTSPHSRPPSVFIWFPLSPPISSAPCTNCTFFAHFASPRLFFLSFSVPLNESVQTNNKRSIISLRCFCFYSFYLPFSNYFAHFDIFSDNDKFYWPGSISYLCIPLDLST

SEQ ID NO: 168017 - protein, 67 aa, Heterodera glycines
KHWEEDEEANRRTSSNKWSGSGHRGPKSIHLAADSRSDRNDQSSAARVASLWLINSREGRKPDGIIF

SEQ ID NO: 168018 - protein, 101 aa, Heterodera glycines
IIIMSPAKPFLLMLFLCCFFGFPLASKDGLLKEEIAQHEDKKIAAMLLDVFLNGWRECIDWKRGEPSIRCVPFPEKKPEKCAKNMWENAMENVRNGKIKKC

SEQ ID NO: 168019 - protein, 138 aa, Heterodera glycines
QQTDGQMPRVAVTTASHHTELVQKALDALVEGKLISEIERVGGAGFKVLRCLEGATAYVFASRGCKKWDTAAPEALLLAAGGTLSDMSGRLINYGPSVQLINSGGVLATAPGVDHQSFVAAIPQLVKESLPETEIVGL

SEQ ID NO: 168020 - protein, 86 aa, Heterodera glycines
DEQEDPKDYRKGGYHPVQIGDVFKNGRYHVIRKLGWGHFSTVWLSWDIEIKRFVAMKIVKSAEHYTEAALDEIKLLECVRDSDPTD

SEQ ID NO: 168021 - protein, 172 aa, Heterodera glycines
RNCEQSAKILSLAGATCTGKTSLANSLVEELRRCGLSVRLIGQDRFYKTKEIVRTLANAEDPSITFYDYDQTDALNEHLILDEIASASKDPELDALIMEGNMLTDLDAIRWADCTVFLTIDKESCRQRRVLRTYDPPDEIGYFDQVVWPAYERTLQKAKEFKETSTRPLAFV

SEQ ID NO: 168022 - protein, 40 aa, Heterodera glycines
  unsure (1)..(40): unsure at all Xaa locations
FFFFFFFFFFXXYLIHNFMSQKSKTTTLHLLISAQKVAAF

SEQ ID NO: 168023 - protein, 17 aa, Heterodera glycines
KKKKKKTLTKKPLTLIK

SEQ ID NO: 168024 - protein, 151 aa, Heterodera glycines
  unsure (1)..(151): unsure at all Xaa locations
MFVQLVLLAIVGITFVDAAAPPFGQLSLKGTNXLVGSNGKXPVQLIGNSLVWEPPVPTILNAQTVKXLKWHWNSNGLRPPIGGEKGRLFGCPETPPTHLTALGFEGAFSRGFYCIPNXHALNPNREKGFYFFPKISKGWGSTPFLFLKKVL

SEQ ID NO: 168025 - protein, 64 aa, Heterodera glycines
  unsure (1)..(64): unsure at all Xaa locations
KIISSMSFLLFVTIAFANLAPNAFGQQWPKATSDETVPATIVVTGGSRDFGYKRLTASSALGXR

SEQ ID NO: 168026 - protein, 79 aa, Heterodera glycines
  unsure (1)..(79): unsure at all Xaa locations
KGGLSKGSKFTNSGVRRYTSSIXEKKFNSRTYFLKRQNWKTPGVTKLNSFEQIPLFTSWGNNKKSRTDPLSKNLPTLKG

SEQ ID NO: 168027 - protein, 90 aa, Heterodera glycines
KCPPPLPVFTSFFCWSSAAFQPFCVWHWPTLLAKVKLTQLVFALVANIMTNGATIGAVAIPIGGTGERNKWKRMGDEVITNDQIKTLNKI

SEQ ID NO: 168028 - protein, 120 aa, Heterodera glycines
LNASKSESRLGKIAIFLLPGVGRHYLCAYRLTAAVIEAAIAQGIYVIVDWHAHEPNEDKAIEFFTKIAKAYGSNPHLLYETFNEPLDVSWNDVLVPYHKKGISAIRAIDKKNVIILGTPN

SEQ ID NO: 168029 - protein, 101 aa, Heterodera glycines
IIVRAKRCCCWVGIVLLTVKNVQCGSGGGSRLGFVSTMFWVEIVENIRSIFSGGPFFKYSFLFGRGDGTHFPPFVLRQFFTDLFEFYFQKFFTPVRRRFHW

SEQ ID NO: 168030 - protein, 137 aa, Heterodera glycines
IDPSGNGKDLEADNESLCPFCQRFIRDTLFNAYNRFRTHIKLELVPYGNAKTNGTHFTCQHGTEECRINKFESCAINYMNDPMPFVYCLETLLYENVKFDDATKLCFDLINPGKFVLDRITQCFDGSEGILLQNLAA

SEQ ID NO: 168031 - protein, 87 aa, Heterodera glycines
MPENPTNTSDHQRLEEMLCHLTPHGAAVPYNVCFDSDHCLWVASKRSLFNSLSGLLESVQLVFPFKMNSPRKWDIPSGFYFNSNIIF

SEQ ID NO: 168032 - protein, 17 aa, Heterodera glycines
FFFFFDVRYKILEVLLI

SEQ ID NO: 168033 - protein, 143 aa, Heterodera glycines
DLFGAVITQLGLLDMLRFNKLGIGSDWVSEYGDPDNATDFSYIYKYSPLQQLSVTPGKQWPATLLLSADHDDLVDVSHTLKYTAQLYHLLRTNAESWQRNPVVAKILVDQGHAFTGTPTEKKIKEKVDIYTFIARALGLKWTE

SEQ ID NO: 168034 - protein, 79 aa, Heterodera glycines
LSKFSVKKLMSSTECTERVSKCDGWPNHLAPFMQIKSWRWFIGAFLYLASGFGIPFFAAEFQLKIFFHSPRAERNTMVR

SEQ ID NO: 168035 - protein, 53 aa, Heterodera glycines
LILVIIIGKINWHFSVRRLCLGSSAADDFVGPASDQHNKNSNNTMLSDQCKSG

SEQ ID NO: 168036 - protein, 88 aa, Heterodera glycines
GGGKKKKWLPFVLRVTNKICWRICAPIWTLPFVHNFPFHFHFHSSKGIRTAPEANVFSSSVKIWLPLRSVCSVSPPFRHFSSPPIVVV

SEQ ID NO: 168037 - protein, 97 aa, Heterodera glycines
SNCFSLFRLPDAVLTILEDEKKSTAAEKQQKKADDGGQETADSESGGNEWTGRKRIRQQNEQKEDEKGEGPPAKKSLLERVAECNFIFKKKSKNYSL

SEQ ID NO: 168038 - protein, 48 aa, Heterodera glycines
FIRTPFQAHCDWLEHPFRDEVIWDIERIYFVHSQHELDLNDFNHLPAK

SEQ ID NO: 168039 - protein, 131 aa, Heterodera glycines
MHNTPRQLQVLPMLLSINKKLLAILVIIRNMEPDPDPAVMRSLLRFLFLTQPDRDLFTVDALKLIVDYSDNIPPMSDCISKMVKHAIHNDEIIAPFGQTKLGKARPRVPVVENILDHLDRFRRHCIDRESK

SEQ ID NO: 168040 - protein, 95 aa, Heterodera glycines
REPFNKILKQMESVQNRVPIVSIDIPSGKFEQPTDLFLIKGQPKGWDVEKGPPDEKSGLPILSPLFFISLTAPKQCAQFFKGEYHFLGGRFVPPA

SEQ ID NO: 168041 - protein, 50 aa, Heterodera glycines
MRTFLFIAVVGLMLAVILENVNATGKNSPSKGKPSPDSTNHKKDHKNVFF

SEQ ID NO: 168042 - protein, 67 aa, Heterodera glycines
KEISRKHGLYEARIQDLVPNGQWAFSNYGLAAVKKLTIHSTRAEPTACSTVDGHVWVDAKLPVSTFG

SEQ ID NO: 168043 - protein, 134 aa, Heterodera glycines
  unsure (1)..(134): unsure at all Xaa locations
TLCHIDGPNGANALTLAHLRRRRCGRRSELANIAPFSSHRRWSAALLLLRRVIIATSDVGRRPFTVSRVLELWTTATASSTAASVSARRSSASPSSISSTSPSSIPNQLIIVNNAFVLNVFFXXXKXKKKKKKK

SEQ ID NO: 168044 - protein, 100 aa, Heterodera glycines
CTARHAFPVRLIWHPTIHPVRPAVHQIWAPTLAPMVASPARHPHAFRHRVPSSRRGYDSRAERGAAVTGVAVIRLRSSNECVCGMIWRCRNVSPANDRIN

SEQ ID NO: 168045 - protein, 59 aa, Heterodera glycines
ILNSRFTKKCPINKLLSRMFYHRSLATFMFGLARGSNKGSSSPAPRDESLPVRNKPRKK

SEQ ID NO: 168046 - protein, 130 aa, Heterodera glycines
DQARSKETLKARFDADTDSLRSLLEDTAHKLHNDLIGKDALKLAISDFDARWTTAFGQLNSDLNSLRPLMDSAEAAKLEAISDELAESAKKLRTNAAQRMAEIEQEEGRVGNLLERTTNLANDVSVVGEK

SEQ ID NO: 168047 - protein, 32 aa, Heterodera glycines
ERLLPPPPPPTISKLHRSCTEESSAQNSVILY

SEQ ID NO: 168048 - protein, 34 aa, Heterodera glycines
FFFFFGLIFKNLSFIQNIITNKINNPFDNCSKFP

SEQ ID NO: 168049 - protein, 31 aa, Heterodera glycines
FFILAIKYHTSLYIICYHISFVYNFFALITY

SEQ ID NO: 168050 - protein, 80 aa, Heterodera glycines
MLKKIIVDGDCFFKFKFFLLAQQVVVRCEAFPKRAIWADISESGVFGPGEKRRRRTISASATCIWNSAKRMPMQLRGPSP

SEQ ID NO: 168051 - protein, 170 aa, Heterodera glycines
YEASTQPDDPCNIQYTSGTTGKPKGATLTHHNILNNAFFVGLRAGYANHRTVICIPNPLYHCFGCVMGSLAALVHFQTCVFPAPSFEPLAALQAIHEERCTAVYGTPTMYINMMSHAEYPSFDYSSIRSGIVAGAPCPVTLCSRLVNELGMKDLQVCYGTTETSPVSFMS

SEQ ID NO: 168052 - protein, 57 aa, Heterodera glycines
KFVFNVIKLAKMYCANAKKCCRPLVNHSRAFSIHQWRAFKACRESNWTMAISFVGII

SEQ ID NO: 168053 - protein, 127 aa, Heterodera glycines
CGDGVIQFAKAEHGQGEQQRKGQAERNVEESGAEKGDQPDELKIGRGMGERDGRLVFLIALLKIFISLIIINASFFRQMPKIPAQLKAFYYTLFGVSKMSFIMPILDFLWLMPGPLFCAYFAIFSAY

SEQ ID NO: 168054 - protein, 37 aa, Heterodera glycines
TTIVLKKGAQKTHLCVKIFSFGRHFSSLEITILGFCH

SEQ ID NO: 168055 - protein, 127 aa, Heterodera glycines
DWRTNGFFPRVTFCDLKTRDIGQFREHTVQCVLMINMFAEKIFIFLWLWFFVFLIIASLNLLFWTYQILSMRSKERMIIDALRLQNIRPSRQIVKVFVYKFLKLDGILVLRLIDSNTGQIHMADIVH

SEQ ID NO: 168056 - protein, 133 aa, Heterodera glycines
VMDMLRFHKFTVGSYWMNEYGDPEKPEEFEYIYKYSPLHNIRLSRGTQWPATLLMTADHDDRVVPSHTLKYAAQLYHYLKKPEVKLTQRKPVIVRVETDAGHGAGKPRDKVIDELTDIMSFLQRVIQLKWYDD

SEQ ID NO: 168057 - protein, 115 aa, Heterodera glycines
MISHRIACLSLSKKGVIFCHSLKKFSSLTDGGNGQRASLVVVLLLIGGTIASAVNDIKNFWRGIDYGWEEGRVEKTSILGVVGTQFIMRRLRASIVNKWVGIWDDGVGVVANICP

SEQ ID NO: 168058 - protein, 152 aa, Heterodera glycines
WPNPNDGKSHCQVELDTGDERPMIASHVKGTLAYLAPEFLTSRILTTKPDVFGFGVDLLEVSTGQRAFSVSRNPQGIVEFVLKMCTEAKHKDDTNFKNKCYFELADKRTPKTDDERSLLIFNKLLSVGISCTEKDRFARPIFSETFARLDDE

SEQ ID NO: 168059 - protein, 46 aa, Heterodera glycines
GVAKMSVGQRAKLTISPDMGYGAKGIPGTIPGNSTLIFDVELIAVK

SEQ ID NO: 168060 - protein, 178 aa, Heterodera glycines
PKNGEKHLGALTAGRRDHWAKVRKEHFTGNNKTSLRLIERSAFVVVLDEEPVFYDPNDTSKLDRWAEKLLHGKGYDRWFDKSFNLIISQSGRIGINTEHSWGDAAVTAHFMEYVVLQDYCVQGYTSSGDCKGEVCQSVKLERILFDLDEVVQKQIEVSRHVADELIADVEMALLVWTD

SEQ ID NO: 168061 - protein, 85 aa, Heterodera glycines
EEEREGDNKCQSEEVPSVEEQQKMGKFETEFHAAFSHEGIFKVSPVLAKLKFADDAEKTGKGRCQMPSEEHIFLPSLSVDVTRKL

SEQ ID NO: 168062 - protein, 59 aa, Heterodera glycines
LGLSRKARLFSVQRIPVPLFVQPSKFRYPNLVFLNGQISWVSKMPIRRVGCHLKPQKQL

SEQ ID NO: 168063 - protein, 74 aa, Heterodera glycines
ESFIRDVNCNREREFSFCCPFVIKHFLEGQIIQLDSQIDEHWFEGTVDGRTGFFPITYVEVIVPIPSSSTTAQQ

SEQ ID NO: 168064 - protein, 69 aa, Heterodera glycines
LLQLFNEMAKAHEVWRPIHEFLSVWPSTWSRPLFVHFCWCCVSWRAYEALLERKDEEMVVQLEGGLTNH

SEQ ID NO: 168065 - protein, 170 aa, Heterodera glycines
IGHVFIWDLTCPARPTWKLHFDDWNSPPQSICWTEKDKIAISFRRRLFRIYGLIPPSESDQFGSSHPVLECDLNKTCGAKCCSQPLIFPGLISFESSTFSYFGITQQAPSYIWVTSSPDDESEKDQICATTLMQGRTLLHLIMHDKSIAESEDNNKNFCFSHDECCTYRR

SEQ ID NO: 168066 - protein, 113 aa, Heterodera glycines
AAPVRPDSGMGSDELSGGWVGRFMCQTLDKYINSMTMLMSPFSSLSIVPVLPASLPASSVCKWVDFTNKHGFGVTFRDGTRSLLFNDQSSLSTSYCQRYFTYRAQKFVGNFVE

SEQ ID NO: 168067 - protein, 143 aa, Heterodera glycines
LEDLDKVQTELDTLNETASDEILKVEQKYNQMRKPFFEKRTHFIKQIPNFWVTVFINHPQISNILEEEEEECLHYLTKVEIEENEDIKAGYKLKFSFDPNPFFENSEIVKEFNWTAAEPNSVTTEIKWKQGKNKLANGTGSEE

SEQ ID NO: 168068 - protein, 66 aa, Heterodera glycines
TQKYRKALEQIKAEMVKDADYCKDCAIPTVTQVLATPIPLSEQTKELMQKGAKKLDEKFKTFTKRS

SEQ ID NO: 168069 - protein, 86 aa, Heterodera glycines
RPRSTPPSSTALCGWPNCASVASIPLHLSDALLSLHPFFDALSLFVVWNCKRFAELEKRRYIVVYKVPIVAKFCAVPMKKKRRSFF

SEQ ID NO: 168070 - protein, 132 aa, Heterodera glycines
GCMPPTDATESQAESSTQAAYDEQCEFGWEQCRIGGGQQQHGFRSRTAVAAALSPHNYFAHLSPQTPSSSACASVSTFSCEPNPSSNNSPSPIYPKVPSPCLSSHSTFIDEFASPAFEDDQHNFVHFRQIDS

SEQ ID NO: 168071 - protein, 165 aa, Heterodera glycines
GAHPFLNSAFIKMVRRYSEGNAITFAWIRPLVLPELRIVDRVDAVNRLVDVYDFMGAYLWLSYRFEEHFSDRDKVRELQRECVGFIQKSMDKMLSEYGEEEAKGAPRKGKRRENSDSEYELRAMGLHRNSSKRHDDTVSKVQKEGLQEQFNALISKMRKQRKQVK

SEQ ID NO: 168072 - protein, 171 aa, Heterodera glycines
IHFRQLYLKMNLWMLILMFGPIHSVRIRRHWVKGQLNDEVNRKDFEHNVTDHSCANANHSADQIANFVLSDQSKNCGKDRNVFDQSQQSDELNDRDEKANHSVDSLESDQCLSNKSKSERKCKFADHQKLRITNQYNHFISAYLRKGNHSKNEWGNFLKKLANVLGVKGRT

SEQ ID NO: 168073 - protein, 28 aa, Heterodera glycines
SISSDPTHLLISTRDVNEQDENKKHGLF

SEQ ID NO: 168074 - protein, 137 aa, Heterodera glycines
RRLVATVDTIEHFCALMDLHNIKDRLALVKAAFAPLTLFCAVSSTARVTRNRDILCLCNFGYVPRGAHLSYAEPYHFSNRLVDRALDELVEPFRTFNFKEQMNTQSALNCTQIEEECGGHLLGVSGRCFHNSGEFPP

SEQ ID NO: 168075 - protein, 82 aa, Heterodera glycines
KHYLSIGLENEKESARNVRNLSIQKFVTVLRWGVGKRKEDDLRDDTRVPNQKSDVTGDSVIFHFIWMCCGQNPIVQLGQPAN

SEQ ID NO: 168076 - protein, 103 aa, Heterodera glycines
DDIDLYVGGLVEEPLIGALVGPTFACIIGDQFRRTRDGDRFYYENPGIFSSAQLAELKKTSLARLLCDNGDQISKVPFYALLLPSAIGTVPCARLAQLDLHKW

SEQ ID NO: 168077 - protein, 73 aa, Heterodera glycines
SGSGGSMVAKLKLSDTVLRMDYEHRNRPVQLTVNWDAVTHDKLDFYHFHWTKPEDEVLDHLEDALGIGTESDG

SEQ ID NO: 168078 - protein, 31 aa, Heterodera glycines
  unsure (1)..(31): unsure at all Xaa locations
RKKRKTKFDGRFVCFTFRQNSSKLIXEKKKK

SEQ ID NO: 168079 - protein, 58 aa, Heterodera glycines
QKMDGRINFPVLFHCFFAFLRLSSSAESPICCCTLCRLFFGRINFRALSIKNSTRIFV

SEQ ID NO: 168080 - protein, 35 aa, Heterodera glycines
NEKQLVYFHVFSCDLVSFYRIITVVQYMAHAIKNK

SEQ ID NO: 168081 - protein, 174 aa, Heterodera glycines
TESSSPITSPDNISQLCTPSNPSPPQGILSLPEFANSYQLDIISALRGNEHDFLAKAAIADAIRAFQSDEDKMELIDFIASEEHGAIALTLENNACKMFNCSPSELPLVSSNYKTKKHFLSELCELFTTSLCQSIPTLFAMLYPLQHSNPNFQIRKIILRHFRDRVLIRLLANF

SEQ ID NO: 168082 - protein, 21 aa, Heterodera glycines
LEFLLIKCDECTKTSNLIKHV

SEQ ID NO: 168083 - protein, 109 aa, Heterodera glycines
  unsure (1)..(109): unsure at all Xaa locations
KFREPEVLNFTKYLNHRTGDGHFFVLSCSFFGISTGESESESSLESDDEEEGEEGEFGEEEEEGEGEHEEEEEHREGXKRGKGEMKVTRKKANDANGWGHGKTEGHCPF

SEQ ID NO: 168084 - protein, 122 aa, Heterodera glycines
LKLTTFQKPLFFLVTFSNPIKFTHFTLFQVQEYTGPRKAICSLVNVENQAVNGSITFTQESPADSMAFEGRIKGINANHCDLFVHEFDDLSEGLSSVGPVFNPPQTLFSGHQFFGSFHKFQG

SEQ ID NO: 168085 - protein, 78 aa, Heterodera glycines
GKFCCRTKRPTSELTWLNPQQSPRKETALRTWHMADKCTAHNWTCQKPIKRFRTIYFALDKNYRIEMPNANVIKFKRT

SEQ ID NO: 168086 - protein, 63 aa, Heterodera glycines
VGSAKAKLVETTGGPCVIEAGGWIFNTEAHPLDPGIVYCCSKKHQSDTALLQQFEQDIDFIPP

SEQ ID NO: 168087 - protein, 42 aa, Heterodera glycines
LICYLKTITLKGPLKLIIKKQFKKIKKKITHYSKKKTFRKKN

SEQ ID NO: 168088 - protein, 174 aa, Heterodera glycines
MISARSAGLLTVSASLIAMVSIFFYLPLLVFKIQRINEQLKVDSDEFKAMADETWDQLITVRSTLPQEMLLRKRRQAYELPKAYPLHNSYAKQDAYVHGPTCACNPLNNCPAGPPGPPGKPGEDGIPGTRGPAGGPGLPGNAPPVAVDPNAGCRVCPHGPTGPAGPPGESGPTG

SEQ ID NO: 168089 - protein, 41 aa, Heterodera glycines
MTIYLFFYFMRNQNYNVFVLYILKDKFLTSKKKKKKKKKKK

SEQ ID NO: 168090 - protein, 53 aa, Heterodera glycines
AKVKIIMATNRPDTLDPALLRPGRLDTNIEIGLINGNTSLDALNTPCHQSVEH

SEQ ID NO: 168091 - protein, 134 aa, Heterodera glycines
WSEDTPISAGPIFGHHSHRIGAAPPPPPPQHAARAAVGAAGALATDRSAQQQRLPSHYDRDGANANANHALLARGDLANDDGNNDPMGFGQAEAGQTARHRRGPALILLLVVLPLVVGAFTVLLVFLNYHCNML

SEQ ID NO: 168092 - protein, 94 aa, Heterodera glycines
GFLGPAVPIGAAGKFLKISRQFINRKLYKNCYFFDKKIKKNSEKFQLFIKNFGSRKSEFRPQKCRNWNSEVRAIPGIYAGSLGHIKNFSVKNCF

SEQ ID NO: 168093 - protein, 29 aa, Heterodera glycines
FFFFLTFMEMYAPKPNKKSNKKVTITKFK

SEQ ID NO: 168094 - protein, 121 aa, Heterodera glycines
LIRADNSATKREKFPGIVPKKRMVYDIVRCVQVESKSIAAVIHHQNCGCSFSQHSDDGLNDPFAGHGQTAPFLDQLGHLGLAVRLRQQHINGRLNFGTEFHLFLKVSARFGGKRFTRTNAD

SEQ ID NO: 168095 - protein, 52 aa, Heterodera glycines
QKNGRKLFSFFSASINCLSVKQNKYILFIKIKTISSKQLDWPIYACLTVNPG

SEQ ID NO: 168096 - protein, 83 aa, Heterodera glycines; identical to SEQ ID NO: 147661

SEQ ID NO: 168097 - protein, 94 aa, Heterodera glycines
LIFVGILPFFFGCLFLFSATNKATASTTSIVTTKNANNDEVRLNSSNIGTESDLAVFAFLAIGQPQIVEAEHGTDQQQNGEKTKRGHFVNLIIW

SEQ ID NO: 168098 - protein, 76 aa, Heterodera glycines
SKSSLKMKLSIILLLSLAFCALIIDAYPSGNGKDLEADNEKNSDCCRCVSRNFVRNQIINNVYYFEKFLSYFCCFL

SEQ ID NO: 168099 - protein, 80 aa, Heterodera glycines
ADKFIFRNNPILIGISIHFCSVLFLKCGGIYTFPPPAAGVSCEVGCGVAAGFDTVRQLFWESAVLVIPVGLVLQFESPSL

SEQ ID NO: 168100 - protein, 87 aa, Heterodera glycines
MRTFLFIAVVGLMLAVILENVNATGKNSPTKGKQSLDSPNHEKDHKIEHEKYEAAYFQSLLFFYMSKVTYRTMLPVTRLFSNHKIFI

SEQ ID NO: 168101 - protein, 51 aa, Heterodera glycines
NDNLIKVFSYLFSSQLVRHKRWGYGYGGGWGGGWGRGGWGGGWGGRGWGGG

SEQ ID NO: 168102 - protein, 107 aa, Heterodera glycines
RRIGSVPFSSTTDSPTGVPFLFLWSQIRWSFSFFGCVSGHDWAIVELEVPIAFSDRVLPICLPASPALQQISDGEVLTVTSWGRRDAFHKGDPLIREIPLRHDAGCK

SEQ ID NO: 168103 - protein, 148 aa, Heterodera glycines
YVEMESKVKAVFEQLKGDAELGGTYYPLQGNVGQVLERLIEGVKAIESKVPFSRDDRLGWLTFCPTNLGTTVRASVHIRLPKISAKPDFKSTCDGLKLQIRGIHGEHSESAGGVYDISNKARLGLTEFEAVKQMYDGVKHLIELEKKA

SEQ ID NO: 168104 - protein, 25 aa, Heterodera glycines
FFFFFFFFFFLNFFFFFFFFFFFFK

SEQ ID NO: 168105 - protein, 141 aa, Heterodera glycines
MWPNIFFNLLIFILIFGALTEAQNQQKIETKTLVSDGQSHTLEISGLYMTMTQETLSDGTIVLRFTGKNIDVETSKSDDNSLTTEASLPTNEVSSSTAKEASTLNCAKEEEEGEEAQNAAESDDGSFSMPDESDDSMADRV

SEQ ID NO: 168106 - protein, 55 aa, Heterodera glycines
RVNHHIYITMLLLNVNVGNIYYLSCLIGLDYAKNGVKDQSSFSWEVEIFGRRVII

SEQ ID NO: 168107 - protein, 29 aa, Heterodera glycines
NPWHFKMSATSTHHWHITMVEMTSSIDRI

SEQ ID NO: 168108 - protein, 39 aa, Heterodera glycines; identical to SEQ ID NO: 167895

SEQ ID NO: 168109 - protein, 112 aa, Heterodera glycines
SWYSSSVFLTILVLLCYLIPPFCFLFEFFPFLVFCCCCCFWSFPYPLARSLHGTLLSMKGKMCRTLSQFFSLQYYKKWTNLAKFGPTMLLNSSNSSDLSYFVAIESQFRPAA

SEQ ID NO: 168110 - protein, 40 aa, Heterodera glycines
FDYSRHQRTTCDRLVGFDDGRLELMNAKSNFCLMKTHNYF

SEQ ID NO: 168111 - protein, 180 aa, Heterodera glycines
TDLEESKYQQMEPRLSIYGRAKDEWDKLARWAIGHDVWSPNARWIIQVPRLFDIYRTNKILKTFDDFLDNLFTPLFEVTNDPNSHPDLHRFLQHVSGIDSVDDESKPENVAFTKDSPEPADYDNDQNPSYSYYLYYMYANLTALNAFRRMRGLNTFALRPHCGEAGAVGHLSVSYLTSES

SEQ ID NO: 168112 - protein, 126 aa, Heterodera glycines
SSIPRLDNVRVLVMGVAEDCCPKVTAKIHIDQFIDCIAQHCPQLTRLEIRWDDETLRFSDKSSKFIDVLRMKCPKLHSLVLSDGQYYELVRSNFERADRLSVVRTTEMCKTGLLHCSKYFNQLLFN

SEQ ID NO: 168113 - protein, 76 aa, Heterodera glycines; identical to SEQ ID NO: 129528

SEQ ID NO: 168114 - protein, 152 aa, Heterodera glycines
MSNIAFIRIQKECKEIILCKELQENGVTIEPVNETLFEIIGKIRGPPDIPYENGIFILDVRIPQEYPFQPPKVKFTTHIWHPNISSQTGAICLDILKDQWAASMTLRTVLLSVQSLLLSPEPKDPQDAIVAKQCLSDPALFRSTAKYWAQHY

SEQ ID NO: 168115 - protein, 158 aa, Heterodera glycines
  unsure (1)..(158): unsure at all Xaa locations
AKKYPVGDRNGAINAFIRKAIKKLVEQNILILVEGATQKSARYRLAPEVKQHMKKVESKTIPTSPKPKSEEAKKAGEAKKKTXVSAAKIKDVEGKKKKKTGVSKKKVVMTRKPAQEKTNVLAKPKVKKSAKKKTPKAAIKKSAPAAASVKSSVKTDKA

SEQ ID NO: 168116 - protein, 105 aa, Heterodera glycines
FFFFFFFLFFPPPLFFFFFFFFGTYTLFNFPRQNKRTSARKQINCLNKFPLVSKRMPFFTQCQRMNGRAFFGRIWRQQRRVQLNQPIWLIGGCSFLGRVNPLIKR

SEQ ID NO: 168117 - protein, 52 aa, Heterodera glycines
KEMIIGRGQNYELSIKAKQRKTVFSSIFLAICVNFLLSNFFNAFNRKKKNFF

SEQ ID NO: 168118 - protein, 97 aa, Heterodera glycines
SKKIIVFSHSFAITFILLLQLDLINFSLGFSLPLVVRSTNVHTITSRLGSIGLLNFSFFLFLDSLPLRQSTIKQRVDFVSLFFEFEHNVIHLVNLFG

SEQ ID NO: 168119 - protein, 161 aa, Heterodera glycines
MHADANVDWAKLLGTMDGENEGEDEDGQEQRQAEEEWHQKRLQMIKWRAEQEERNIRAKKRTRQDDDEEGTNGRRRDADDEKGPIVELLELDSPLFALGKKLLCAAKDANSASPSSSRVVPSSSLSAASLFADVSIPPPAKRRDSLLNSYLRRTDAATIRT

SEQ ID NO: 168120 - protein, 118 aa, Heterodera glycines
GNRIATALFYFSQPEKGGFTVFTELKTPQKPSKYDALFWYNLLRNGEGDLRTCHAACPVLLGVKCVSNKWIHEKGQELLRPCALKPSVQERYVGDLGGPEPRGHPNVSPYCKTALYCE

SEQ ID NO: 168121 - protein, 74 aa, Heterodera glycines
QINWGSTICWQNHRPNVRIKVVIKWLSNHQNIHSFYYFIGPFPKIQFTKMVSKLLPVILCCLFLVCLSIRYKIL

SEQ ID NO: 168122 - protein, 65 aa, Heterodera glycines
SVIGEKKNSKFFFVYRFLKKKFNDKKCQLVNRSTLNLSPNGTSFSQHAHCGFLMSFELNEKLISI

SEQ ID NO: 168123 - protein, 184 aa, Heterodera glycines
  unsure (1)..(184): unsure at all Xaa locations
HLVFNLYFGTFPDYANTDLGFDFGKAMVAWASSNLQNFRPNFDLSFPLFNNEHPFKDDKPWHLQPHFPNHDKYLASFKGKRYVYGVGSKTRNILHHSNDNRSIVIATTCKHNTDWKKXEDERCEVDNANYGRWDYEQLMANSTFCLIPRGRRLGSFRFLEALRSVCIPVILSDEWVLPFSEVIN

SEQ ID NO: 168124 - protein, 72 aa, Heterodera glycines
SGLIVQYYNAFLKRNYVVSWQCLDIIRKDMVDPLSGKRMAESDIIELQRGGTGYAATNKLDAKLIRPQLELQ

SEQ ID NO: 168125 - protein, 125 aa, Heterodera glycines
  unsure (1)..(125): unsure at all Xaa locations
LMNWLVGFGXFFFFCLLSVLLPFXVSSSSAAFCLLSLVSAXGRCLCAHCRWQMAINGGEETVPLVVGHQSKPTPSHRFPKALLQHLSVDRVELKCGRNSTIVWAIGGWEGGGKEGGGGTNCQNGR

SEQ ID NO: 168126 - protein, 119 aa, Heterodera glycines
RQPCVVFAGHPSLRIGEIVQLLDLWGGMSRNAIIMIDPDYPLETYYAPYKSLAIRAYYYPIETRLDGTQVLNKIIGECGPKQVLFPEEYASAFSTLQALPMQAMSFRQNECVSLDSAKG

SEQ ID NO: 168127 - protein, 78 aa, Heterodera glycines
LYVFTQFKFCRSWTRIRTKCATMPHLPTQTGIDLTQMALNSHLFVHKNTQNANLLFYYTIKSRRSSTFYLSFLIVLLF

SEQ ID NO: 168128 - protein, 119 aa, Heterodera glycines
  unsure (1)..(119): unsure at all Xaa locations
LFRRFXLXPVNXSAPDAHSXIDGVDRCRVSXPFSSDNPFALFAVAQEADENGGIGSASLMAKRHLFEALARQGRSPRSASSATMRNALVRFGKHALFPXVALDDKHNPPQPFIHFGHSA

SEQ ID NO: 168129 - protein, 95 aa, Heterodera glycines
  unsure (1)..(95): unsure at all Xaa locations
GSPEWEQVTEEQKWRLGITVDEDGEFWMPWHEFVRYFTDICLSMQLSNVTIGLTEKRWREWTFFNRWSSNSVKXGAPKNHAGGXVHFPATFCYNP

SEQ ID NO: 168130 - protein, 177 aa, Heterodera glycines
  unsure (1)..(177): unsure at all Xaa locations
MFVQLVLLAIVGITFVDAAAPPFGQLSVKGTNLVGSNGKPVQLIGNSLFWHQWYPQFWNAQTVKALKCNWNSNVVRTAMGVEQGGYLNDTNTAYRLTAAVIEAAIAQGIYMIINXHTHKPNTNKAIEFFTKITKAYSSNPHLLYKTFNKPLNICXEHLLIPDHKKIISTIHTIHKNN

SEQ ID NO: 168131 - protein, 152 aa, Heterodera glycines
  unsure (1)..(152): unsure at all Xaa locations
MPLVHNCIAGTRHSLLIVLGLIMIMANCGQAMRQQAVAVRGQLRCGNRPASGVKVKLWDEDDGPDPDDVLDEAFTDSSGSFQMKGSTRELTNIDPVLKMYHNCDDGIIAKQHKLKLHIPNQYITNRRLTKRTFKXEVLNCKTVFTEEEKNFI

SEQ ID NO: 168132 - protein, 193 aa, Heterodera glycines
  unsure (1)..(193): unsure at all Xaa locations
ERQRREMLRAEHDRRQSQLRHKMEHMRQMKHEMLLNERQLAIQRFQNNERQIMQXANGWYNNAQQXSSVPXPPMVSPYPHQQHYQQIPNSMPPNTAVTMNAIPSLPQNITTPMPPNEMLTNVNLVGIRAFQSNEHQIMQQQMMGQQPQMHQYQMPHLASPYPHQQQPHYQQIPNSMPPNAITADEQKNQMTGV

SEQ ID NO: 168133 - protein, 76 aa, Heterodera glycines
  unsure (1)..(76): unsure at all Xaa locations
DSLLCPLCQXSKMAFFNKHLVGFVFTQPPSLRELCFWTVXRQLAEWRPRGKIWRGGRTXKEXQAMFKIXQTIQIVH

SEQ ID NO: 168134 - protein, 93 aa, Heterodera glycines
MVEGGITLVKYLLFFANFVLWTLGLAFLIAGVVLQLKYTGLLDILGDERLTTPMLLLAIGCLCTLLGFVSYCSTIHKNYCLTVSFTILLTLLL

SEQ ID NO: 168135 - protein, 94 aa, Heterodera glycines
  unsure (1)..(94): unsure at all Xaa locations
KFQIFVLALLVLLRFFNPPNCQAIVKLVETFSAADELVGLDLESGSRVFLRCGVWDNVCVKQASLNACXNITSNLLEVDEVMHAGMPHLXGGQK

SEQ ID NO: 168136 - protein, 78 aa, Heterodera glycines
GHGKCVTFFCDCNLLLMLLGGGGYTPRNVARCWTYETSLAVDIDISDELPYNDYFEYFAPNYRLHIDASNETNHNTEE

SEQ ID NO: 168137 - protein, 149 aa, Heterodera glycines
  unsure (1)..(149): unsure at all Xaa locations
MMPSSVIPSGSSALAHLGAVDYYSAAALQQQLLQQQLTALAAANPALSVAAAQQQQQYAAAIAAAVASNSSIGQQCAVPTQSNGSDSPSAGGWSLSXHNLASEVREPTLWQMFRPFSAVLXIKLSKRKEQATISITNYKETIITANTLN

SEQ ID NO: 168138 - protein, 103 aa, Heterodera glycines
  unsure (1)..(103): unsure at all Xaa locations
SPGIWRVFSYKHGARQKKATRRRKSKNTQKFEDERNSFNTRQQNLREHAKNELLGKILKAKNEFMEKIXNERAQIAEKLFCKFGRRSDGGAKHXITGGQPNHR

SEQ ID NO: 168139 - protein, 72 aa, Heterodera glycines
FFFFFFFFFFFFFLFFFFFVLKKIYSPNSKAEKELKKEQTTNMKRICNKIPALLHSSQVWHFFPPVSYGSAQ

SEQ ID NO: 168140 - protein, 55 aa, Heterodera glycines
SVKSNQLMFTSLPMPNRIGSHNQPRNLPNTPLRRFGFAESASSSSISWIVGPTPL

SEQ ID NO: 168141 - protein, 64 aa, Heterodera glycines
  unsure (1)..(64): unsure at all Xaa locations
LFCIGAVIXSEGQKALIRAEKGAVIKNLIIGQNGADGIHCYNGCTLQNVWWEKVGXXXXTFRTS

SEQ ID NO: 168142 - protein, 157 aa, Heterodera glycines
HLLADVRQRFLQKGGRLALCRKMVPFRLFDVFFCLEVFTLAKVRCAFVAALKGKDAPSLSLNDDTTPSLNGSGSFLDVTADENFNRLIPASSQLEKRDIAIGVLSSQLDVLNSQLEKKDIAIGVLNSQLEKKDIAIGVLSIAVVGMGATIIYLLNRR

SEQ ID NO: 168143 - protein, 117 aa, Heterodera glycines
  unsure (1)..(117): unsure at all Xaa locations
SIEEYNLGQVGYYLDEENNWALDMDELERAXEGSEHDVKAIVVINPGNPTGQVLSRANIENIIQFAHKHRLYIFADEVYQENVYAEGAEFHSFRKVMFEMGAPFDKLELASFYSCSK

SEQ ID NO: 168144 - protein, 74 aa, Heterodera glycines
MKLVTLLLFLKIVFADNDKDDCDDDKDKSLKDLDYRDQIGFVDCGCSTINGTVVCAYADPFPPYQMKGGFDCQS

SEQ ID NO: 168145 - protein, 140 aa, Heterodera glycines; identical to SEQ ID NO: 125863

SEQ ID NO: 168146 - protein, 226 aa, Heterodera glycines
  unsure (1)..(226): unsure at all Xaa locations
SRSKRRRRKGMPSGGDDEQQFEEAVKPALESLLADLQKTTEVLRQGKHGKGRRQQKEDESAALLDLKKLRNSPRQRNQSPAAVANLRNGGSEELQACRDPMLEGDXLGIHTIPEGDCAPCNQAGDRPAAIALGTILHTEVRPGGYQSVGRRCHWWAAPTRRRQEHAAQRGTRPRGXDAAPRRGRHPARRMRVARDGALREGARNAAADXADRPAQAHVSGGRAXAX

SEQ ID NO: 168147 - protein, 89 aa, Heterodera glycines
  unsure (1)..(89): unsure at all Xaa locations
MAMAFAQKKGPKAEGRRCRTVGRRRTKKWPKFEWVELLLLTARLFXNCSPPXAISDELFGASLCPLTKMAIVKIKAAIKNLLAIFAINY

SEQ ID NO: 168148 - protein, 121 aa, Heterodera glycines
VADRENERIQCFSAGLEGTTHNRRAYVPTGTFVTKAENIGRIYAIREKEHFLVGVTSWDRSGQLEPQVFVMDMNTGKANSFAKGLANAHAVALSNGGDIFVSQLEPQQIVKFSIPSAGDAQ

SEQ ID NO: 168149 - protein, 83 aa, Heterodera glycines
KVQLKSQLLMNLEMRPVQFEDLARQMLAHGQRKTADEYSDLIDRVENTDIIRIAHKMLDSRLSIVGYGDLRNMPTYKSIESRL

SEQ ID NO: 168150 - protein, 65 aa, Heterodera glycines
PGKYCQANEQYKAYRRCSVAHSKCTMKNTPSDVKYTILKQVNGSNLSKNFIEIMPPITSWDPASP

SEQ ID NO: 168151 - protein, 40 aa, Heterodera glycines
EADLLCIRDRIYLYLYVLSCIHLAVVISFTCIFQINIGKY

SEQ ID NO: 168152 - protein, 121 aa, Heterodera glycines
MFFCSLLKKDELPADLAALLSSKVVADINALLANKSLDCAQKLEKIDELMKTVPDEVMEKLPMPPHLAQLPEEVQAQIKKLCLETKHKSVEEKKEAFKAYAGTLPAEQRAIICKEKPSCGK

SEQ ID NO: 168153 - protein, 171 aa, Heterodera glycines
  unsure (1)..(171): unsure at all Xaa locations
MGGVTQRSSIATADLMLPRQVSIVTVGTSTRAAEKRRNRTTVLLIXMAGSYAVLWLPFTFVSILIDLDWLGVESGSPIVERIDQTCKLLSITSICVNPFLYGYLNTNFRHEFNEIFLYCFAWLPAVKESRQSEISSSLGGGGGSHRRSIPQYSAIVSKTDGSTQQSNGVKV

SEQ ID NO: 168154 - protein, 36 aa, Heterodera glycines
IYGKINNTLKLKYKIKFKIPALCHALAHVPLMSSKY

SEQ ID NO: 168155 - protein, 122 aa, Heterodera glycines
KKKAYRRLKNTIRLINAKFDVFPPLEKLLDIKRRICGSLQYAPIETSAGVGFVCTGCEGALEARLSSAKDNLIRFGDEIFIKLSGDHGQSCTKITASFSQAARSNSPSNNFVCAVFPTKDSR

SEQ ID NO: 168156 - protein, 90 aa, Heterodera glycines
LYESNKLIKACVSQPVLPNLNFVGSKVKSEFCSIKMKNDRLDCNTANVFVLIIRYAEGTTDHELIWSGKAVHFFHADFAGTFHQCPVQYL

SEQ ID NO: 168157 - protein, 173 aa, Heterodera glycines
NLFLLPRSRRSERTKNHRKSPQNCSTNRRNFAPLNQLCRYSVSPSRIRTKEEIWDGFRRFRAGDIVRIIDEDEGKGYFAQTVAFITDDYTNQFAMVIWLLPKLSRNSFPKPFEFNADRFQHGFAEERPVPIKACEFISKCPPFPPYKRKWTPINQILAQKRSEITRRIEEMNL

SEQ ID NO: 168158 - protein, 59 aa, Heterodera glycines
LKNKFKGLKKGCYPRPTGRCLCVVGKDSAGREITERRRKETDCKCQKGERSAQCPADGA

SEQ ID NO: 168159 - protein, 88 aa, Heterodera glycines
CTAQRNGGCSHGCVNTEGSFYCACPPGMVVDPAHPRQCLPIDGGLKRAADLFSYWAKMSKKAGKEAMMNVCRAMDKRLLRRVLIKTKN

SEQ ID NO: 168160 - protein, 59 aa, Heterodera glycines
FQSLLFWDFAGRCLAYIDNNMEKLIKSDDFLPIDQKLFLEILSRDQLKVGEESHIWQAV

SEQ ID NO: 168161 - protein, 31 aa, Heterodera glycines
GRRRVTATHFKLYIVLLLLIHNKFKKDMYNL

SEQ ID NO: 168162 - protein, 176 aa, Heterodera glycines
TCRACAAFFRRTVSLKLQYSCKRKDHCEVDKAARNMCRACRYQKCLRQGMLTTAVQHSRDGIGKRSGSVQRERLLVTSTGTSGETKIARGASDAVSSSSSSAGGPQALIGIQQKAQHLLGTAYGRNRPLSPCSSSSALLLDQAANAATIVQLNAAPGHSSARPSALSPLSITTPAA

SEQ ID NO: 168163 - protein, 59 aa, Heterodera glycines
TTKSRKASFRKNHKKIPKSYRKVHVFLTSPLPLTIFFLCYFSFSLCYSMPSVIKLFFGK

SEQ ID NO: 168164 - protein, 113 aa, Heterodera glycines
LVRTAETLNTKHSNAHCAIGVTSIGTPGSGPLCLIIHFRIIIIQNPFPFIIHVHSTSNEEGVIWIIRVRKRHHHLYPLKLLNLCFVFTIVHLCLFTLHFSMCSFLPSSVLIVI

SEQ ID NO: 168165 - protein, 79 aa, Heterodera glycines
  unsure (1)..(79): unsure at all Xaa locations
NALSHKYVSNNTKMVEGILRHHWPYQPLDSFPCVCCICWAFIFLRVGVWGXTTFSXCLXCFXLAXDLGLVSFIIXXEWQ

SEQ ID NO: 168166 - protein, 83 aa, Heterodera glycines
  unsure (1)..(83): unsure at all Xaa locations
LQKPTVIYNKMGNLKPKGIIYTAAQKGKKGQKMSEANGKSPKGXKGTRRSXVSSXFILQGGRETEDKXVANSKKSGYXLAEXK

SEQ ID NO: 168167 - protein, 176 aa, Heterodera glycines
PKANPRKMNSIEFLYISIFNATLSQSVANLFFIIHPSAKRSMGIPLAVLLVPFWLFLLLFAFSICQGCASPVPVHPFCFPFPLHSDLMEFLCSSTGVDRGGAFPRHFDGKNARKNRRKRFACGDRQNLPAFRRLVVLLVLAHQRERIAAHLQPQSHRPGIGRRKVPKGRGTERSAS

SEQ ID NO: 168168 - protein, 134 aa, Heterodera glycines
HNVVTTWLILSLNNVKMSNNKKLFFGMPNVSSNGCDNESFHRRARHAPLRRAKAPRPSGHRRTWHVSKGQCGATRSASSRATFVLDSSSSCGPVHECLAFSSWRMCIITFPPSFFPSQKIGLLASSRFLRHPVP

SEQ ID NO: 168169 - protein, 93 aa, Heterodera glycines
  unsure (1)..(93): unsure at all Xaa locations
IPSIFLCPKPSSIKNNAFPPLASSPFRFASSSSSASVRVSLLRGGLXLRXRMKAPNSIGLAXSMGAAWXPASEGRMGXXAEDETVKGANQLIK

SEQ ID NO: 168170 - protein, 173 aa, Heterodera glycines
HTLLCPSILHSNSRKTAMAYATKYYDYQIAVVFAILLGGLLLLALVVTAIYYICVVNMRGKKGGITRVPSGRSTVRTRMNPQQYSPSAQPQIFHQQYPQYSPYGGMEGMSSQQTQQQQQQQHPFQAQNYEQAGVRVREMQPEYFQQQGPISYTNYPYDQQPPKLSADTQAAAT

SEQ ID NO: 168171 - protein, 58 aa, Heterodera glycines
FFFFYAKLYQSLSLIIIINSLSFLPFVLFLHSFIFSCFSSHFALCLFPNISSSSQFSP

SEQ ID NO: 168172 - protein, 58 aa, Heterodera glycines
NAARLFLWHSVRERIPNGGAKHLLKARCRVYFTHSFRCAPSKCRDEFDHISRRMDYAD

SEQ ID NO: 168173 - protein, 146 aa, Heterodera glycines
MRYPIFQIFLIMSFICRFKSAVIFRSDTMNQTDYGPMVLAHNGTSPSDQDKIRDEETDHWLTLTQTDQTTTDQNSTLSIDWMSNTIMKADHDATLSLGEDHGQTLEAKNDDEPNLENGHYGTTPTDYEPNEEKNAVDNADHNDMAV

SEQ ID NO: 168174 - protein, 181 aa, Heterodera glycines
  unsure (1)..(181): unsure at all Xaa locations
LRKEKYRRKFVEYDGVKSILLALNGRANFQLQYQLIFCLWSVGFFRTFXLKNNXWKKFVNLISXISFRNLLEKIDNREMVRESALQMVQCKTLKTLELMDAKKFDDPDLVDDIEXIKILIKILETSSDPLPLSVAAHDIGEYVRHYHRGKTIVEQYQGKQAVMKLLSAEDPNGRYHALLAI

SEQ ID NO: 168175 - protein, 79 aa, Heterodera glycines
  unsure (1)..(79): unsure at all Xaa locations
TLKVGISISFPFLYFLSPNVGFDRQRESNFAKSYTNRTFNSFGFSSVQQQIGEHRRNXQAQSFECSRCVGNLRQFAPRN

SEQ ID NO: 168176 - protein, 178 aa, Heterodera glycines
LIGCRCDTNEEIIHCDDHVLRKTVPLPPHGTHLRGFTVLSLTNNNIDELPDEQLLMTKFPDLKSVDVEDNKNFDCDTLKLFTKLNVLSDCGKKNGKKDDDRVHVHGPNSDEPKHRGKNEWKKCDDLKRRRNDDQYVGCLWDQLHERLNEISEDYGLKTLIDDIGKMFNDVGERIKKIT

SEQ ID NO: 168177 - protein, 71 aa, Heterodera glycines
  unsure (1)..(71): unsure at all Xaa locations
IIASCDYDEADSEWSDRRRVAASEWLGPAIGDYKEEDMAIEEPTXVGDHYECWAGRPAINFSLSPHMHFLL

SEQ ID NO: 168178 - protein, 212 aa, Heterodera glycines
  unsure (1)..(212): unsure at all Xaa locations
MDIADEQKAEWETVGETAAMVSGPVPPPPLPSEEPTPAQVESPTPVKKTNVTTLQQKQVVPLSKLNGVFQEEEEDEVDTLHQIKKKIKPFEITREDRLQSMTPEERKKLIKDLITRIPTDKAKLFSFEVCWEFVDENLMERRVRPWVNKIICEYIGEEGQSLVAFICEKIANLSTADEILQDLSMGLDPRSRSFMVKLWEIIVYEXEAYRLG

SEQ ID NO: 168179 - protein, 132 aa, Heterodera glycines
  unsure (1)..(132): unsure at all Xaa locations
MRTFLFIAVVGLMLAVILENVNATGKNSPTKGKQSLDSPNHEKDHKNEHEKYEAAYFQTGSSGSPKKGKSPHADPKKAASHLVPVTPGKVXXASLKMVKKLCGAMMPTMNKPKAVEVDVEKKLWYHHAIIVV

SEQ ID NO: 168180 - protein, 41 aa, Heterodera glycines
LINSINDPPPFPSNIALLPNIRTVPNHRPLSVQSVCNGSEF

SEQ ID NO: 168181 - protein, 22 aa, Heterodera glycines
RELVSSSNSRRFSNSVSSYWRR

SEQ ID NO: 168182 - protein, 58 aa, Heterodera glycines
FVMNSTLVCSVRFVGQHAVAHWDDPAIPTCQNCVHLLERHRCDAEGAVGETLFHFIRP

SEQ ID NO: 168183 - protein, 88 aa, Heterodera glycines
TSEAPNYALYEHAVGYTLFKINEYEDIGQIQPEVQSAMTDAQRFQTIVQVHAFDPFRNTEAALENANSIAEGIIHVDLLNFLEANLPK

SEQ ID NO: 168184 - protein, 44 aa, Heterodera glycines
QIVNLRPKQAVEVQLIVEESEERLTEEQVDELVETIINSLPRNY

SEQ ID NO: 168185 - protein, 47 aa, Heterodera glycines
RFIDLRVEDIVFDMIHKTKRDHHHDIPFKVTSTQKRHYIFASLRRSM

SEQ ID NO: 168186 - protein, 19 aa, Heterodera glycines
FLNLGIVNMGTILTNDTAN

SEQ ID NO: 168187 - protein, 20 aa, Heterodera glycines
FEYSHFTVYRFLFSFFSFLQ

SEQ ID NO: 168188 - protein, 67 aa, Heterodera glycines
FFVSNLSLNTLTTSASKRNISSRVKVKVSSAFSAVVPWLCDLSAFPFSFGGAAAPTKKIKNKTNCER

SEQ ID NO: 168189 - protein, 41 aa, Heterodera glycines
MLFDCQIFRIYEIRKCQDNFSINGIKWVVMDGSWNLCSHSW

SEQ ID NO: 168190 - protein, 34 aa, Heterodera glycines
FCSVCPHILSSFQEVHSDCREEFDRIKTVVSGQT

SEQ ID NO: 168191 - protein, 23 aa, Heterodera glycines
CIKKKVWGGEKEGRRKEEENVVV

SEQ ID NO: 168192 - protein, 32 aa, Heterodera glycines; identical to SEQ ID NO: 142079

SEQ ID NO: 168193 - protein, 84 aa, Heterodera glycines
FVLTRFIHQKKHEMNEVFEKRKAPAHKTISISETKAPNVSGKLSYLCSSDHASLPLSLSSDDDAPTRPSPSPSMLPLGAVDVLC

SEQ ID NO: 168194 - protein, 70 aa, Heterodera glycines
FFFFFLHLFRILSQKIMEKFVSIPMLSSVLNPAISANFRVRLAFLTHSLCFVRQFVHFYGRSFDQKMNSS

SEQ ID NO: 168195 - protein, 18 aa, Heterodera glycines
YYLPNSASEMFLYPMEIQ

SEQ ID NO: 168196 - protein, 40 aa, Heterodera glycines
FKVFHFYSIDAIEWRVKKMSFDGSCSHQRSYPLPPGGGGG

SEQ ID NO: 168197 - protein, 32 aa, Heterodera glycines
RELVSSFFFFFLNRSQNIQRMAQHPTNIGTPY

SEQ ID NO: 168198 - protein, 39 aa, Heterodera glycines
FPISFSHVALLMSYLSLQHSSTPQMSGAEAGIAVRHRGE

SEQ ID NO: 168199 - protein, 53 aa, Heterodera glycines
ERTSLEFFFFFFIFHMPNSAMVSSKNIRTLAKDPSVCPSVRSAFCLSPIPCDN

SEQ ID NO: 168200 - protein, 54 aa, Heterodera glycines
SKKTQESPLQRRWRKSSWKNVLNTLITPDHTKKAYVRLAADYDALDVANKIDII

SEQ ID NO: 168201 - protein, 70 aa, Heterodera glycines
NLSPEVLCLGRGRRSLCSFFGHRSSFEEQLIKLQSQIVLIMTIFVSHINDEIRMLLKRSLFKKKKKKTRD

SEQ ID NO: 168202 - protein, 19 aa, Heterodera glycines
RELVSSFFFFFSTGDSIKN

SEQ ID NO: 168203 - protein, 60 aa, Heterodera glycines
KAGTLLSLRRHFSQNHPLRYLLRLILLFDKFSKPFVVFPWFLNDELCFPKKKKKLETSSL

SEQ ID NO: 168204 - protein, 49 aa, Heterodera glycines
LIRQKRLPGVFGVADHEYDIHFDQFRPRIRIRTKSQNSTWVNETNLIPQ

SEQ ID NO: 168205 - protein, 32 aa, Heterodera glycines
FGIRRPRGCNPEFACCCIHVPFFEFGVKLVLL

SEQ ID NO: 168206 - protein, 30 aa, Heterodera glycines
EMTDHFELCNFVLLIHKNCFFIVEKGKSTK

SEQ ID NO: 168207 - protein, 36 aa, Heterodera glycines
FTQKSLFCQGKGECSTFFMEGKEQFAGVGAAESPFK

SEQ ID NO: 168208 - protein, 50 aa, Heterodera glycines
FYLNKLFLFIYIKNVPHFSICFFVHFRPFVVVTFCVFAADLDIPKIGRPL

SEQ ID NO: 168209 - protein, 22 aa, Heterodera glycines
ERTSLEFFFFFFSTAIPLRIKF

SEQ ID NO: 168210 - protein, 23 aa, Heterodera glycines
ELVSSFFFFFFNPVKYSQNAFIR

SEQ ID NO: 168211 - protein, 55 aa, Heterodera glycines
SRVKNANAHFRIIPFSQCQPSVVPGFRRFPQMILVGFAETVVDSPSLQECFDNCL

SEQ ID NO: 168212 - protein, 37 aa, Heterodera glycines
LNGWMGGRSRRLNFGLIHFEQIVFVESVDRRRSGEWV

SEQ ID NO: 168213 - protein, 60 aa, Heterodera glycines
FWNLCTSKSAADGQGAQHNKHQQMTTNSLVTKLFAAQLANVWRHPKANGTNAKAPSTRRS

SEQ ID NO: 168214 - protein, 52 aa, Heterodera glycines
WKMGSNGNPEEDLINLTDKLKKKLAKHGEDEEEEAKLKRRKSKKGIFDRTIQ

SEQ ID NO: 168215 - protein, 48 aa, Heterodera glycines
SFVTVPTRANNLLGYRCLNSNEAKRFFNISQPLQLILCSLILKKMKKD

SEQ ID NO: 168216 - protein, 47 aa, Heterodera glycines
MKIIFVKIFTAGTLLAMLTVAVIVTKFYFIEEREERRDGGGRHRNRQ

SEQ ID NO: 168217 - protein, 43 aa, Heterodera glycines
MARGHQKALSQQKNQQKQQQQKKGQGNDQRAAAAKALTFKCSV

SEQ ID NO: 168218 - protein, 64 aa, Heterodera glycines
MNCLLPKLWFSHYYDMFESFQGAITDIREENVVQPLLVSSFAVKQAAECVRSILKIDDIVSLTR

SEQ ID NO: 168219 - protein, 16 aa, Heterodera glycines
NAVISKKRKKLETSSL

SEQ ID NO: 168220 - protein, 17 aa, Heterodera glycines
FNSFLSFSQFVVISHRR

SEQ ID NO: 168221 - protein, 95 aa, Heterodera glycines
FCCSTRPRVASSPCFAPVPFVIRDSYPSSFVNFMYAIASSISSVCTEEFFVVFVLKIFSSCVCLISSSVFAKVPSKMKNSAKMTMGRTRRAILRH

SEQ ID NO: 168222 - protein, 54 aa, Heterodera glycines
LDSAEPYLQRFGGLDGESVLTWDRRKYLIVYRDIICCFIIVKISVQKKKKKTRD

SEQ ID NO: 168223 - protein, 68 aa, Heterodera glycines
GTACVVTPVGRILYIRQGNGRAGRMEDMQIPMPNSDEEPLNIMQRLYKAITDIYYGRQKREEWTRIVV

SEQ ID NO: 168224 - protein, 54 aa, Heterodera glycines
TATNCQKTTDGNASDQRKGNANRWWQNGDAFKAASPSDDRPHFVWRRNWAKTLL

SEQ ID NO: 168225 - protein, 81 aa, Heterodera glycines
KITDFIEANNVLPNCQHGFRRKHSVTTQLLEVIDDFSLALENKKSIDVIYFDLAKAFDTVPHERLVSKLKNVGINGTLLKK

SEQ ID NO: 168226 - protein, 15 aa, Heterodera glycines
ERTSLEFFFFFFFGK

SEQ ID NO: 168227 - protein, 32 aa, Heterodera glycines
MLRMEGQNEQINGKCTIKIVWSQLRQTHKGSR

SEQ ID NO: 168228 - protein, 64 aa, Heterodera glycines
MSTSNKLRRKNSSSATPSSASLLHINDARIAGLYDLEHTIGKGHFAVVKLARHVFTGEKAMIPQ

SEQ ID NO: 168229 - protein, 34 aa, Heterodera glycines; identical to SEQ ID NO: 127577

SEQ ID NO: 168230 - protein, 84 aa, Heterodera glycines
LVTKIYLLVNNEFNKLSKCSPINQHDHSSPSRLCPFSSSSFASSSSPSDELDDESPPPFFLLAPFFRAFCLSRFFEKLPFLLIQ

SEQ ID NO: 168231 - protein, 89 aa, Heterodera glycines
TAIFVLFICFLFIVLPTIAQMNQPQGIALVRRDSDYDELLTEFRSKGSRMRFGKRSLGPSTDAIGLPSSDSFSNSADPNNLMSGHFNWN

SEQ ID NO: 168232 - protein, 115 aa, Heterodera glycines
MPEEQRTDFNMDRWLDAYDEDIGRCAEVIVDYLKNRSAVGFDDLESGGDFFARPSARHYCGVFTQSKLRKDWVNAYDNAIVFVETGVADPNMAARVTRTGDFLREFFVHCEFGWR

SEQ ID NO: 168233 - protein, 127 aa, Heterodera glycines
MDPSTAALPPMRFSSTSLVPDPSVQFLLDLETNARSIACGIDMALRDLRGSLRGMSDLTCESANVFGSVVNSTCDSVDASIRSMYTMLAKTEELDESLRSIEKLLQQIKDTKRLLDKFEEHIVVGNQ

SEQ ID NO: 168234 - protein, 124 aa, Heterodera glycines
CFSLKIKINTQKFGIHFKWLICVFVVLVCFCVFSLIFCFSACLVPCRVHNSLRFVLLRPLILRSPLHNYSDVKCIREGIARHLTDRIAFLRIFIFVGVRFPIAVFLTEKENQIASRWVHFECKK

SEQ ID NO: 168235 - protein, 72 aa, Heterodera glycines
INDFNWQSTFHLKCFKVLLVQFRHDDTDLTSPFEAIAPVTATPSLTLFPSANDKNEMAAARPPLDPPLFDGF

SEQ ID NO: 168236 - protein, 168 aa, Heterodera glycines
LVTIKMCSCNSCTNKWMCCCGCHVTSGSLVIAWLYLVSSLLTLPSAFSALVSQYHLVAHNFMHLTLTLLFCFCAIPIIVGEMCTQRTHHMYLPYLIINPVALIVALFVAIFAPSTNIMSRVPNHQQHDVAAVFVATLMLFALILSLNIWMYSVVYRAYQFVKRYGQEE

SEQ ID NO: 168237 - protein, 107 aa, Heterodera glycines
  unsure (1)..(107): unsure at all Xaa locations
LRQQFLSANKCNINGITSQQILHSENVKISSWSVEVFRFLCLLLLLLFSSYSGATVKRNFICGFVHVVHTPSPKQXIRWFXPFTVAXXICESYCYFXXSFHDRNVLL

SEQ ID NO: 168238 - protein, 150 aa, Heterodera glycines
MATPVGDLETEWETYETEFKKAETEHLSYTQRHNENGKELKRKLSELVRNIGRLLAGGGVSDDDKGRLEALKTKAEKAGLKLSEMFRDEAIEKLKTSYKEAKKNPFWNNTISTASLLVDDSVFRFLSDAVNLCEGEPVRFSSTRPVTGSL

SEQ ID NO: 168239 - protein, 162 aa, Heterodera glycines
MAFTVRRPLRECQANRAGLNLRLHLPRSRSNIDIPAFGCAGANYMPFTGFSAVKSDIYRVNPLYSLRNYMSDKYYHFSHRYKRTQFHRHYYHGQIDQYPYEWNFEGRGTATGQFYFARRMKFNPWQFGWNRFYDPYRRYYDPYHDAYIKLYDYRPRLIDGIY

SEQ ID NO: 168240 - protein, 90 aa, Heterodera glycines
  unsure (1)..(90): unsure at all Xaa locations
TIFAWTWSCSSTAEGDALDQLGLRHYCCLWMLLSHVDLIEKLPSKHNXETEIEVFLDLPGTTVATQNAFTLLREISEFYQLMACSSNQSY

SEQ ID NO: 168241 - protein, 83 aa, Heterodera glycines
GRRRGGEEESRREKGAEGGKREGREGEERRGQGKEGGGEEGGWEREEGEQREGRRGGEEGEGERGVEKRDGGEREERGEEEGR

SEQ ID NO: 168242 - protein, 74 aa, Heterodera glycines
IQMAFKLAFFFIAPVLCLSILMIGQMPCQTDAVAVHPAVRTAVRLANTKGGQIALGIVAPSALPAARMAKHFVR

SEQ ID NO: 168243 - protein, 91 aa, Heterodera glycines
MCRPLLLFVCFTVAFGILSIVAPNQALAEPVIGGPPPAPPIEGVAALAGAVDPADQPVASGVAPPKQPVVVEASQVEQAEVDQLPKSYGRK

SEQ ID NO: 168244 - protein, 125 aa, Heterodera glycines
ISFILFVKAFGGGSPKKNKKINDGLAQRMSKLLSTGAYADVQFVVEEGDKKELLLAHKAILSHASEEFALILGFDTQNSSHSNGKISAETIKTVLVTDVTIGAFKVMLSFIYTEGLKGDKLSVCK

SEQ ID NO: 168245 - protein, 41 aa, Heterodera glycines
NGCIGRIPKFYIEKLHEKLALNSRLPDPVITGRRSDHLRND

SEQ ID NO: 168246 - protein, 85 aa, Heterodera glycines
MSSSEDESNHYSKKEIREKERRQQKNKKKNESKKANKKNREETIITLGEEKVELPEAVNEIDSGFEAEGGTNETEEEKDVSEVVK

SEQ ID NO: 168247 - protein, 147 aa, Heterodera glycines
MDRPLFRARALPQLSALSEYQLRTLLAHSDSQPEGISPNVILFQRGESLSCWYLLLSGQIQLYLDHCSAADYNQPSSSISQLKLIVPGTFFGELRNYADATHCCSAKVIQRADFVRIDLRHFMALYNKWAEQLQNCIMPMEDLVAET

SEQ ID NO: 168248 - protein, 66 aa, Heterodera glycines
  unsure (1)..(66): unsure at all Xaa locations
MSTKPPADNESNNEGQQKSSNSLARDGNYEDGNMKNRDKQKEFGGPAGPEPTRYGDWERKGRXSDF

SEQ ID NO: 168249 - protein, 104 aa, Heterodera glycines; identical to SEQ ID NO: 146850

SEQ ID NO: 168250 - protein, 146 aa, Heterodera glycines
  unsure (1)..(146): unsure at all Xaa locations
FVCIKPESVRRCLVGKIIERFEANGFRLIAIKMIVATRKQAMDHYVACAGQPFFPKVISYMTSGPVVAMIWEGVGVVRGXRKILGATPDKVPPPGTLRADYRNNSDVGKYHDTVCHGSDSAEDAQREFGIWFDKSEMPAPLSRVSG

SEQ ID NO: 168251 - protein, 62 aa, Heterodera glycines
MARHKNILRIHLIILSFANANASFLSLKVHFLLICPFFSFFCHYYFFETKNFNKILNRKKKK

SEQ ID NO: 168252 - protein, 112 aa, Heterodera glycines
MFEFVSEFRSWPNGCRICDQRPKLLNYIIFSQFLLILDLMSKLPPRVKLCKYKNGRRQDNFIYPNTKHFNKLFGIVVGRHSADARARPIIAQMRLHRVAHFHPVHSIYHFVK

SEQ ID NO: 168253 - protein, 25 aa, Heterodera glycines
FKPLGFILDKFRIFCFLCIYSIINI

SEQ ID NO: 168254 - protein, 169 aa, Heterodera glycines
MIPNQLCTDWMRGEQLLTGYVERGDLVEIRRGSYMHWAVFIGHISGQPLVIHISTESSDMGISTKKEFVRKMAKGCAAIVMLLTSICSTLQRLVLSLRFSFLNLFKVRSDPFLNVISTDFCRVNNCLDANRRPFPPSIIVERALTKLGTGGYNLIKNNCEHLAKWCRYA

SEQ ID NO: 168255 - protein, 116 aa, Heterodera glycines
ARPTNRVLNERTEYGKRMKRLSQRIFGEITRPTDIKSLRVAEIMASEPWEQQAKLSEKYYPNTPMLHYLVKMLKLHGLYFDEHLVWREVQNEIRISKGKIIYPPIGAGKQKMKAKI

SEQ ID NO: 168256 - protein, 157 aa, Heterodera glycines
GTLRKGFPGEMAQKLSTEAEWIGKALLQNAQLYRVHWENFHFDYPALVLIDEKATDKSDNFVVGDLVHLKNAEQSIKWLDAYEECGEQFNQPNEYIRKEVTVQLMTDQEASQNFLASTYVYGWPIKDSDGNFVAPVREIVVAGDWLKFVQKILKTKK

SEQ ID NO: 168257 - protein, 116 aa, Heterodera glycines
EQLFILFKLKSVCDKIKFNLHSTTNSPSQISQKFFADRSHQMFMICQLGRIGWLRAFGEMYKRKSMNWSMSMPKSLKVTDGCCFSLISALSIRSITGEKQRSRAADNTTLLSPIST

SEQ ID NO: 168258 - protein, 117 aa, Heterodera glycines
MSRVIVSYFRQYSLKDWRDYFLSTHFWGPVANWGLPLAAIVDFRKDPEMISGPMSCALTIYSSVFMRFAWQVQPRNMLLFACHLTNFVAQQIQIVRFSNYHFLHLYTDPFAKTVKKL

SEQ ID NO: 168259 - protein, 125 aa, Heterodera glycines
KNLKFFLKIHGFSGSGLAQNSRSNDKFRFKDSICLAINLFLSIKESLTYALLSAGLMLCADVTILAHISHRNFLHMDSDETLLLQWHVVPSTDPLLIGTIFAALILCSVVYLVDVWVVYRQRRWR

SEQ ID NO: 168260 - protein, 115 aa, Heterodera glycines
FVIHRIQSREGQYKLCKVKKQAVGDKQVPYIVTHDARTIRFPDPHIKADDTVVIDIGTGKVTDYVKFDAGNICMITGGHNIGRVGIVGHRERHPGSFDIVHIKDKVVKGSTNCAR

SEQ ID NO: 168261 - protein, 48 aa, Heterodera glycines
LFKMSSHNTSVIDENRRWSDLRCLTDRASTFANSGFVPGIKVKFCVIV

SEQ ID NO: 168262 - protein, 68 aa, Heterodera glycines
ESIQALAEGIEDFSGGVVMVTHDERLIRATDCRLWVVEDQKIYQIDGDFDDYRKEVLDQVEKSLTSIG

SEQ ID NO: 168263 - protein, 129 aa, Heterodera glycines
LFRFHVGRLRWWLLRRLWLRWVLRFTDHFGRRSADRRLSLSHLRCRRPLAALFKTTERKGRSAATTAVLPPILHSQRRTIRNQRIEHRISLKMALISRHNWHFNRTNEGAKKLKIQKKISKKCAFIERQ

SEQ ID NO: 168264 - protein, 158 aa, Heterodera glycines
KWRLKRILSLARTARVLLSLPSFASALSLLSPLSECEISIISLCECEPSAGAAVRKSKAFFIPLGQFRRSFGKGKSPSPSVGISLRKSERSGAFGKGKVSRRSLILHKFGRDQIQKDCARLLGGWLLPLHRNTKCDEDSKERQKQRQKTTHGRGEPKN

SEQ ID NO: 168265 - protein, 133 aa, Heterodera glycines
MSEVGTQRPKLRQKWLMLATEANTDHGVIFAAIENRMQKQCTINVSHRGRCGIQFRTEQRIQIAHLLKWVVVFVNHNQNLKFEEIISRRVRFGDHKILGRNVQRVDRKKRETVGVKAQQNWPFLERVKKLTFV

SEQ ID NO: 168266 - protein, 112 aa, Heterodera glycines
MLSILMYSMLLYAALVLLISPATVVANEDVVGLAMRGTQQFFRRNAKWINLPSGGGSLVSGRGNFRPGFHSLHRSRTQLAEPLFITFKRSPTNLASMMVRLQKNPRHNDGTN

SEQ ID NO: 168267 - protein, 46 aa, Heterodera glycines
MASSGFSVYEVGIIPYNATEADIGNLFSQCGVVTNVRMVYDRKTNR

SEQ ID NO: 168268 - protein, 164 aa, Heterodera glycines
ESVEQSLTELEQNAMVRRQRLLEFRTQFVKKAQQQNGEKESSDGEEAMEEPISLFFRSYKPSKKAEEAPDVPNLGGTHKEMDTLEKHIPDQLEASEDTKMRDELDLKTLAPRKVDWDLRRGVQEKLDKLERRTKKAINQLIRQRVNEGAEDQLAAAVDSVGDGR

SEQ ID NO: 168269 - protein, 174 aa, Heterodera glycines
FPMALLLIVDAYSAAFAHPIHNGRPTTAIDGTKLLLVPSSANFAKVMMANEGTATKHFAYSPRQNGGEALFFRTAKASPQSASSAGIFPYPQSSFDFQNDGELMKNHRFARDVAADGSNGVFVRSGGGATKFAFAKRSGGTFAARANRWDDESAAAQGGQLFAVEPIEWSPLSS

SEQ ID NO: 168270 - protein, 129 aa, Heterodera glycines
VSMPIINFDRLPAAMRPQRRRLRAIQLFQLVLLSLFGILLFAKVIYKTEMDSEKGGIVFFAIFMFIIIILCIREVYKGSHGQKWHFHGLCALTLLLFLLYGWYYGLLKHEPAISAIWAGIMCELFAYIV

SEQ ID NO: 168271 - protein, 87 aa, Heterodera glycines
RDFYSIGAKRGMQMGTISANHDSSVKFELISSDLSLFPIEFICCPIPILLNCLAQLPLSNMKKSSFGQSVNFGEKKKKKKKLETSSL

SEQ ID NO: 168272 - protein, 56 aa, Heterodera glycines
FVLLLLFLAVSSAFAVLIGICLHQLSVTAPFGTSVGVVRQWLRRNNSRGFFVMRHF

SEQ ID NO: 168273 - protein, 45 aa, Heterodera glycines
FFFFFFFSIRNLSALISEHMKGNNHSLLCITLLYVFIFLLSHKGT

SEQ ID NO: 168274 - protein, 25 aa, Heterodera glycines
FWHTVHLVNGQCQNDHENELVSMKH

SEQ ID NO: 168275 - protein, 204 aa, Heterodera glycines
  unsure (1)..(204): unsure at all Xaa locations
MLQGIRILRQEPVETLFAFICSANNNVPRISKMVEKLCQFYGDSVEVNAQRFYDFPSVTQMAAHLNCMEQTLRDXGFGYRAKSIVKTVEMLADGKLGNSAYLWLHSLRNLPYHEAKLALMKLPGVGPKVADCICLMALDKHXVVPVDRHVFNLATEIYTPTFLKGCKTLSTGIYXXIGAFFVDPHGDYAGWAHSRLVSTRGKPF

SEQ ID NO: 168276 - protein, 129 aa, Heterodera glycines
PLGLGDPESKTLSKVDQEIVIPDLMGKQVHKSECLQEFTAFVQCLRAENSIVGPQKCKPYINVYEDCKLMKFQDDEFRKKVIDEYMDERSKFIEVGLNQKQRKFYEYLNWKSAHIANQNESTDSVDQFG

SEQ ID NO: 168277 - protein, 81 aa, Heterodera glycines
SRSFFFFFFLTTNFFSANKCNKNDIRSGITNILFVVCSASFPFTVAISFRYTRIYRTFTSTITFFRETTTCVSARIFIIVF

SEQ ID NO: 168278 - protein, 62 aa, Heterodera glycines
SAQAHNVLSDIDKKLHENNALTNLLGKIETRTGLKRFHIFGALVGHHMLHLLHGRWAQLACN

SEQ ID NO: 168279 - protein, 181 aa, Heterodera glycines
MLSLFSKNDCLAPKIGRLKAMANGWRRRRRRNIMPMGTTTTIGTTMARMIVPFLVISAVTEAASAAAAEQTARAIRRADPGGFRAQRICYQCQMPMQCQSGFCYGDFCVKSMVAGKYVSKGCENRTISASNAAFYTSANPSKASQSHGPRKKFHIFLNFNYPPAPSPVLLSVRPFSRGDGR

SEQ ID NO: 168280 - protein, 217 aa, Heterodera glycines
GVGDRFLFALIISTFAYKILNFPQFFFCFIAVVAAWIFFQYHQKKHWHRLDVPGPNVNIFFGNTIKQIRNGSIDVDRENFSKYGNSFGSFLFDRREFCTKDPDMIRQIFIKEFAHFQNRFDFIPGRKEDAPKSLTRNMINMLRDDDWKRVRNRVTPAFTTGKLKKLIPILCECTERLCKVCEDEYASNKKEILLKDLYGRFLLDVISRCGLSLDLNT

SEQ ID NO: 168281 - protein, 159 aa, Heterodera glycines
AKRATRGQRRIYEENKQTLLCYVLASICSSVLVFSLNYFLFLPQKGAWIGLALSSASQAFSVILMSMMMKTVRNERNQLVDAGLDLNDPNAFGEYCKDIVILSVSAQLLSLIWTGFFFVLLSIPFFTLYKLWTNILGPWFFRPTLDDDEKEDKKKQKKP

SEQ ID NO: 168282 - protein, 146 aa, Heterodera glycines
YSFVSFTFAEFIDEEKMTEGECRLTGLDSTNLKCSACRLLGQFNLEEILTDCLRCCEEIKIAEERFAYAEMHVCECNLHRFPQVAAFVRSEMKDQWGGKLKVKQVRGVLPTILLKSGDGQTHKTLSIEKWDTDTMTEFLNGALSLG

SEQ ID NO: 168283 - protein, 112 aa, Heterodera glycines
  unsure (1)..(112): unsure at all Xaa locations
LSNHESWVAQTHLSWLTXDRDYDANXLLCYESISSKETLTLRCIHXLHWDCLDSRAHHLPKTTAPADYRWPTCLXCLFPSDNESTPVVDKLRAKLQTVNWSSCGLGLPRIIE

SEQ ID NO: 168284 - protein, 75 aa, Heterodera glycines
ILRMKFQWCKMCFFKWQCTAIHPAPSHLFHPSVRLSSFLPFLRPSFQLRSVRPCLRPSFHTGYAGTFESGTSTGN

SEQ ID NO: 168285 - protein, 79 aa, Heterodera glycines
FFCVNLLKCSSSIEEGKLLGSNADNISGYRFDYNIFHLSRTDCKKQFAGQRQFSEHLMRFHREATKRSQRRRPEKAGEV

SEQ ID NO: 168286 - protein, 88 aa, Heterodera glycines
  unsure (1)..(88): unsure at all Xaa locations
RATLCPVNICRIHTILKVSQFKMGNESTFAQGILYVMTENKRGYGGHTNPXLIPKIXTTKNIVLRMEXLTAXHCVHIASKRCKHFELG

SEQ ID NO: 168287 - protein, 149 aa, Heterodera glycines
NYKSNCLAKQRRKVIAYAKVADDDYLTFASPPIHEGIRQFGLRKLRCLCAPTIPSASPPNRRCVRLSLRFGALSPPNPPLPTAFRGRRHFQPILWAAAKILNRRANGQLGSECRGFGPRPAQNGGPLCGALPPIRCCCSTRRSIALQTF

SEQ ID NO: 168288 - protein, 54 aa, Heterodera glycines
LNRRGRSSSSNTKRDLARKDHFFPHKFLIFCGVSNLEDRIFFIICGPKSRNFTQ

SEQ ID NO: 168289 - protein, 115 aa, Heterodera glycines
MSTSLKHRDFVGEPMGDKEITAVAGIGPVYGKKLEDKVKKFTEFSGSLISNFQPIQIPEKGSIPFWIFSGPKKVKVPPIVNFCFFFQGFDQAYVLFGQFLILKKDKELFTEWLKG

SEQ ID NO: 168290 - protein, 149 aa, Heterodera glycines
KATTIRCSADCRSFASVKLAATNLSTSKANCFKFFAPRAVAIFGPSFGILCPSSVVAQFFPFAPSHSFLIVQKEHCAFCVVSWCMSLCWSLQSVCYFVFPTAVVSKGQFRAVRPLSVVRLWLYPFLRMNGRLSKFRRSDVSRCSQISAD

SEQ ID NO: 168291 - protein, 137 aa, Heterodera glycines
LFLALLMKTMFSNGFVVQQQQQNFKDLNGFADNDKQLPPLPAVQLVRSPANSLDASHRLLFERLSSEAKDRFAHKQMAMGEAKEWDERRIPRPQRRWLMRTTELKEGSGGDKYVKRVVSESELNALLKNAWLGKKRR

SEQ ID NO: 168292 - protein, 18 aa, Heterodera glycines
RKCGRAEVFRLHSVDRAR

SEQ ID NO: 168293 - protein, 95 aa, Heterodera glycines
FQQVATFMSSYIVNFANTVDTDQKGQMCEKAIEDVHMIKRELFSLDRCQVGGGARISDQIDEQLHVTTTFWQINLNNIFVFPSFGAPFRCMFLRI

SEQ ID NO: 168294 - protein, 71 aa, Heterodera glycines
TRGSPKMILLTYLSSLSTPLLPSFFWCFWHSERGIYVRRRGRRSQWKGGQSKCIFIGRGRGRIDGRSHWEK

SEQ ID NO: 168295 - protein, 97 aa, Heterodera glycines
SDYHNIINHILAPASFQSRLSAHCSHKGTSVLLLLMNAHIVTFRVDIIQHEFVKNNLEDGRTRQDKAEHKSDQRHNCVIRLKVDARPKVRPIEQQIE

SEQ ID NO: 168296 - protein, 93 aa, Heterodera glycines
RWLSFKAALLWTFSRGVQQKNKSHGQWSVLISFLIYEIKDAYLAHIRTLRSNSLPHIVETYRLEFHRRKKSQAQNAKRAILKKKKIINQIEGK

SEQ ID NO: 168297 - protein, 130 aa, Heterodera glycines
MRLINPKCLFLHISLPFAIWRVIDKLRAAEDKIILRLNCELPTKSFSKQLDKQRICTDIQKSLFETRKMREHLLVRCLQENEATAERCKESAEKATEGKTAKANLRLIRTEMTVEEIVRNQADTALRERC

SEQ ID NO: 168298 - protein, 119 aa, Heterodera glycines
KKNNHNKKLIKICENWKVKAIAANAYVKSWVCQKKQLEQAEVGTSSSGAQNVEIQVYSCLCMKPNFQMVRQGELQMSSAMEVIKGVYRDLFGWGNGKWMQIKMGLERNNLWSMTTYLFD

SEQ ID NO: 168299 - protein, 121 aa, Heterodera glycines
MAFMALLVVQCSSAAAGDVSPALDNQEEKRVLSADESGPLQNFRTVLEGRHKRSLMGRYRNSTGRKRNSNGRNRNSTGRRRNSTGRKRNSYGRNRNSNGRNRNSFGRGKRSPMAFPPAADK

SEQ ID NO: 168300 - protein, 109 aa, Heterodera glycines
NIHWKENKRIFFLHLMRFRFGNLLPYITIIFRYRIKIQIATDRPFVLLVVQLLVFLCQPMVRTLQTVQHSSVPSDFVSVSPMANHFNALLFFIAAESRRKKRTSTRQLA

SEQ ID NO: 168301 - protein, 117 aa, Heterodera glycines
GAGPKNTVIRHCVFISVAQQRISEPAGFDPLYAQQSLHIKPKHPKLLHPLQHWLHMNWLHKLKWVLHEAYLFKRIPRVAFTAVIAKSPLFASAIISSLSFEVAKVTAANSRHIARNI

SEQ ID NO: 168302 - protein, 184 aa, Heterodera glycines
FLPTLVVVSAATVPILPQQLLSANDQNSNSLPNLTNVLADEISLSAIDCAALPPALWCTKFVRYKCGTSNLCTKHDDAVRYKPLHITLLYESLCPFCQRFIRDTLFNVYNRFRTHIKLELVPYGNAKTNGTHFTCQHGTEECRINKFESCAINYMNDPMPFVYCLETLLYENVKFDDATKLCFN

SEQ ID NO: 168303 - protein, 156 aa, Heterodera glycines
PIFLLWTCYIFLVHHLPHYAQAANENRLINNHHPPQITNERLIKKLCFGNCFKPFTVQAKKGQKFLLEFETQPEKETLKQCAYISTGWSGLEDSDIITFENKKEDILGRASVHLLREVGANATELEFPAGILRCYIINRISGAVKVTDFPYPHGLA

SEQ ID NO: 168304 - protein, 91 aa, Heterodera glycines
KGEEKRLSEHRRRIGGEIDATERSANSAGVSDSFSKDAEEEKAKDKEEAVKEMLGQLKKLGNVFLRPFGLSTDSFELVKQSDGGGFSVQMK

SEQ ID NO: 168305 - protein, 42 aa, Heterodera glycines
FYLYLFKRKSFHNDENAFIENEEMVGIISALLSIRAAQLTQV

SEQ ID NO: 168306 - protein, 160 aa, Heterodera glycines
  unsure (1)..(160): unsure at all Xaa locations
TLCRFVVVAPFVFQIVPSPSCFQMPWLSSVPVMIRMVVVVFVCAVLSAAAAGSDPSDVIDIESLELWRVSCAGRNCSRRCFGWENPVFCADSIQFCTXGVAWPIWMIAXSFGLNXVLIVLVLVHLAVVRVRRDLPFASIRVCDQCQRRVSVLSSRIVSSM

SEQ ID NO: 168307 - protein, 179 aa, Heterodera glycines
LATVIIGAVLPMFRTWKVLKSRKSRQLIPLSKYWIVFAAWVSFESVANLFSLPYFIPAYSFLKFSVVLYTYLVGYEHIYQKEYEPNREVLMASAQYYASKATQHALAYAWNTITSCSPRSKAITTQANGQRNAEFRSVVRIVELEEQEEDFVDIIEQDEQFEDLEADSDNEMTSNSPIH

SEQ ID NO: 168308 - protein, 118 aa, Heterodera glycines
MTVETVPADLRNLRACLVCSLVKSEDQFMADGCDNCERFLNIKGDIDKCYECTSANFDGIIAVCEPNDSWVCKWQKINRKCPGIYAVSVSGNLPKHVVAELSHMGIKYKSGQRDKSAK

SEQ ID NO: 168309 - protein, 72 aa, Heterodera glycines
SVQKSDSASLAFGFIAGAGLELFKINFSCFGISFYKVFNEKQLSQELTEFEEKLANRNSMLRSRIDQFQDPK

SEQ ID NO: 168310 - protein, 90 aa, Heterodera glycines
KCTKKLSKLATVHVEKSDQTAKRVTNENKLLSSKQKFKPASEEFKKCRICNKMTHHISAYYCQNCSYQKGICPMCGRKQIETAKYRQSLT

SEQ ID NO: 168311 - protein, 136 aa, Heterodera glycines
TKDEVALHNSENLTWIIMNDKVYDVTKFLMEHPGGEEVLLQWAGYDATEAFNDVGHSADAKKMADDYLVGELKEDEGQTTAGVSLPEEAKRDEPTESWRQILSSPTWSNFRIPVALSLGVFCAYKLGTAIYRQMAS

SEQ ID NO: 168312 - protein, 117 aa, Heterodera glycines
MHQSDTGSSTPGDSPVDRIEITGLMSLAEFVETIEAEFPEQILLKLYADFRGHNLKMPVEVDEPDDPQFDRFDGQGHLLVEDIVFDMIHKTKRDHHHDIPFKAQYVNDFVANVSYRF

SEQ ID NO: 168313 - protein, 190 aa, Heterodera glycines
MRNFLLLLCFAIILQVLCDEHDHIYSPNAEVVLWMNTVGPYNNRQETYSYFSLPFCQGYKKTIEHYHETLGEALLGVELEFSGLDIRFTVDQPKTEYCNTKLTPTDIDALIFAVEHNYWYQMYIDELPLWALVGEKDKAITYIYTHKKFELGYNGKQIVVADVVAEGKRELKPNMVLYNWDFSTTKLLKA

SEQ ID NO: 168314 - protein, 213 aa, Heterodera glycines
  unsure (1)..(213): unsure at all Xaa locations
LRPSSSLPSRLTFLLFFLLVNLYYLVKSASNSLINDKCMTCKFLSKTFLGGLEKTEKLHFGGGNTDWEERNLGRFKTSETRFVEMLDYVCKRDSSAEIGFSGIKDLQFKCHSLLEAHEELLGQWFFEHQENGPTLGKYLCIENLKLCCDEGYFGSDCSPCPGMKLSGKPCFXNGQCQGNGTRNGNGTCSCHAGYGGKMCSHCDSSYFAVRKIV

SEQ ID NO: 168315 - protein, 90 aa, Heterodera glycines
INAQRQNSNTTARSTHAHGITYGRRQGEGSAAVIRPWKAAKICAVWGIQFKFLGQNHAARTHSRTIGHGGLARTLLVLNPATVVVQGLTG

SEQ ID NO: 168316 - protein, 146 aa, Heterodera glycines
WSPPTFCLNGSSLFLVIWKNRLSGGNIPINGQLPAVRQQQDRETLFPMSCVIILPGQRVTIDKMSEFISRELLSANTQPPARRYAAIEMTMKQIGATSSGFLANFGVRLSAESTVKIGVHQMPKIKFGNTVTSFQDRVRKKQTILN

SEQ ID NO: 168317 - protein, 51 aa, Heterodera glycines
EPKNEWEELKGMREGKRERMSKWERKMPKVKQKKVPKRAEERLEKKKRKRK

SEQ ID NO: 168318 - protein, 101 aa, Heterodera glycines
FGTGGEMDQKECAMCGEKISLTDRLMVDRETIHKNCFACCFCGANLKPGHAAMELSFYNRYGPRWYCSGSAGGCALTPVSEKDAKLKEKGMNTKKFKKAKK

SEQ ID NO: 168319 - protein, 139 aa, Heterodera glycines
ILPNVLPFAQLPNSSLRIALGLLVLILLIGFFPSTDAIQCYSGNQFSIVECPSLYCIKQTLGLDTVRYCDGTGFSSICSTYRTIDSCQTVPSLGYVCCCPDQLCNSAQKVPMNALFGITLLGIALASLNVAMRTTERMF

SEQ ID NO: 168320 - protein, 32 aa, Heterodera glycines
PGRVMITDQNSGNELIDWLLMRLCDPMLAFAI

SEQ ID NO: 168321 - protein, 62 aa, Heterodera glycines; identical to SEQ ID NO: 157009

SEQ ID NO: 168322 - protein, 66 aa, Heterodera glycines
SVQQAKKVAEQLEREKRIRRLPMSETINDLIRYTQEMQKDDYLFNGFPTDKLNPYRPKSNFQCLVI

SEQ ID NO: 168323 - protein, 138 aa, Heterodera glycines
MNFMKKTITRIERQKKQNERERTKEQISAGKLEVLPPRHYPTVEHIDDDPNITLGGVMTEWRYSVLMDNLRFGRFSFKGQNPEVEKWMQFHERRRNGIEDEEEEEEEREEEGEKRRSREEGELSDEEGDGSIVKLVEK

SEQ ID NO: 168324 - protein, 109 aa, Heterodera glycines
QIKVDQEESTKLWDWPLQSHDELVSIYDGRDRWEVGLDTGFFTPNEIEVNRMGQNLFIHCKHDQREGMLGTTSREVQRNYKLPDDVDPKSIRSNITRAGILRITAQKKR

SEQ ID NO: 168325 - protein, 156 aa, Heterodera glycines
  unsure (1)..(156): unsure at all Xaa locations
KKRLFRETIELPVALKTYXPTEETPCRNATVILKXTSPPPKTNVGILGKPEPSDHANACAISFVTGHDLKKLIKDSRLIGNLNKSYYAFLASESLIIQIPRILGPGLNKAGKFPSVVSHYDMLNAKVDEVNATVKFQMKEVLCRAGAIGHVEMSHD

SEQ ID NO: 168326 - protein, 98 aa, Heterodera glycines
GPTKKFCEVCRSWIDLFEDKIQVEKLMMHKRCFVCAICDCPLEPGNCSRDDGIIYCQFMCNDRVPVWFCSAHMMLGSGEKCQLLKEKWMKENEEKQEI

SEQ ID NO: 168327 - protein, 110 aa, Heterodera glycines
  unsure (1)..(110): unsure at all Xaa locations
SRRGGGNNVEGKVYVDGLPXDATSEELDDVFHKFGRIRKIWVARRPPGFAFVEFEDTRDAQDAVRSLDGTRICGVKARVELSTSRSRRDRDERGRGISRENEEKSRIREH

SEQ ID NO: 168328 - protein, 69 aa, Heterodera glycines
GISTGIPNGISICVQKNFNCESSNSTAQWASIRHYTMLNDVIHQIQLPKSVFFDAILRPFEHHNKIVLP

SEQ ID NO: 168329 - protein, 87 aa, Heterodera glycines
MEKIEVKETDMKSNLIDQTIEIVRDGLQKYGQDKDIASFVKDTMEQRFAGTWHCVVGRSFGSRVSYELESFTLFKVNQHTVLIFKCG

SEQ ID NO: 168330 - protein, 127 aa, Heterodera glycines
TFLLFKSLFGHREMRILILGLDGAGKTTILYWLQVGEVVTTIPTIGFNVEQVTYKNLKFQVWDLGGQTSIRPYWRCYYSNTDAIIYVVDSADRDRVGISKHCAVFHRVEQPQVHSGGTACHFRWSSG

SEQ ID NO: 168331 - protein, 158 aa, Heterodera glycines
MSAQNEFMRAAVEEGIRGVQSGDGGPFGAVIVKNGKIIAQGHNMVLFSNDPTAHAEVMALRGASKVLDSFDLSGCILYTSCYPCPMCLGAVLWSRISNVFYAAAPTDAASVGFDDQNFHEFVSNPKKYEKLMALEHLPVEGHMKVFKMWEQRDEKRMY

SEQ ID NO: 168332 - protein, 49 aa, Heterodera glycines
IINSLIGLINHCSNARPFIRLIAHRCVTFESVQCVGSECHWDQILDARF

SEQ ID NO: 168333 - protein, 78 aa, Heterodera glycines
SLRRAPTKAKSIVASETQLTCHVFATTTMCAQERLDRQRIVWYIQCRVRMAHFQSNITSQSDPMDVYSDWIDTCEAAN

SEQ ID NO: 168334 - protein, 73 aa, Heterodera glycines
APTKAKSIVASETQLTCPSCTHYNVCEVKLDLQRNVWYIHCRVCMEDFQSNITALSEPIDVYSDWIDTCEAVN

SEQ ID NO: 168335 - protein, 66 aa, Heterodera glycines
GDQTECKDDNEFCYNVTAEAGVIFKASKAGCSYYRCLISRNKCINTEISGVPVSFCCCNTEDLCYG

SEQ ID NO: 168336 - protein, 109 aa, Heterodera glycines
SIDRFEFRHSCALSDRDQRLEWHFSHDHWVHCQRSGHISPIAFFDAHQGQIERGDVLTAFRTDQHQLVDSGKRFVQIFDLADELVPVRVLLLLVELKLSVHSAQFDLTA

SEQ ID NO: 168337 - protein, 41 aa, Heterodera glycines
ICGFITCSLLCANWYGGKTCFFEGRLGYASGLNFVIVIINS

SEQ ID NO: 168338 - protein, 106 aa, Heterodera glycines
MLDIFTLLNICSKAMLFKFTYCWWSSKVRSGAKTDQQRLSCQCFRHRGRMALLLLCWHCHVERSDLCPKNGRRTKNAEKTIFAPSGVNDRRELIKLLFCCSLLTLQ

SEQ ID NO: 168339 - protein, 67 aa, Heterodera glycines
SNQSNVMTARSSLHLRPLGHVHCDQIKSPNRHRRHFPLLNLCAHFRICPHIFHQFHTLAFDLFSHFS

SEQ ID NO: 168340 - protein, 169 aa, Heterodera glycines
PKNIYKKFLCCLCGQHFDGVGPLESHLALVHVFYLAYECDLCKDALFPSDFALREHYVKIHNKTCFTIKYRVSPELEERRALLRRLVDQSMHKTGSGTIQQNKAPNLEPPNSYTSQLLMDCTSLLQTQLMASNHFLNSGIKKENVWEERNDGARVDHLEGEIEGPPIEG

SEQ ID NO: 168341 - protein, 119 aa, Heterodera glycines
LAKFTPFVGKSIRYELHNFLQNSSLLSKRVDFFHVYPKAFSVNGSSSGEHSNRVISQWLVGIELLPGKIVDSELRSELSQMLGNFDAKVKNAFNYFLFHAVDLFSEYVEKNELKLRRFD

SEQ ID NO: 168342 - protein, 147 aa, Heterodera glycines
ATDSLLNKWQGKTDIEQLTRLFVVMGTPTEQSWPGWELLPDANKVMFDVVEPANDWTKIVPSVSSEGLQLIRSLIQLNPCIRSSALRCLQHPFFTHHPQYDQIPYQPPLLEQMGGRRKVPEIVFNDSRRMEKMKPATNKKQAQWHKG

SEQ ID NO: 168343 - protein, 194 aa, Heterodera glycines
NAIAYDLSTVNGFHVAHLNLTKNRYQMNAIDQARLVQNLTNWQRMHPLFLHGHFAFFDFERFGLPPPIWINLLREPFDRFVSYFYFLRYGDNFRVGLRRSKAGNNETFDECFRRGGRECDPSAIWLQIPYFCGTAHFCSIPGNAQALQLAKRNLLDHFLLVGLTERIEETVLLLEQLLPAFFLGAGEHFRLLNG

SEQ ID NO: 168344 - protein, 175 aa, Heterodera glycines
MGKDKKGDYDPDIYGDWQDEKKPCACHCSYLRAKNFYRVECDFMNRGVKRLANVGRVALGLLSLPTMFIPGVNMLVAKPQVDSVGQDITHTALEVRYECGICGQIAYKTYEIVCKDVTSDRWGRYMKTYGDEPIFGIRTTEFDGIQRVFDGMWKNYDFINNNCKNWTRDMIGCLS

SEQ ID NO: 168345 - protein, 177 aa, Heterodera glycines
MDMDKILSDMRQHISNLQDKLHVANSAVSKGQIVNEKITLMKEYQDKIASLNSCWRARNRTQLVHNLQQESRQIIALEEENRQLRFALKEMEDGLHLIMNDYRKMFSGFMRGEELAEVANAQHKKVFLAGVSYEQYFGIARAAEKFMAISENKVAEDDQVITQLKLENQTLRALFHG

SEQ ID NO: 168346 - protein, 31 aa, Heterodera glycines
FFFFFSPLFIRRITGEIDGIMVNITLHYSIS

SEQ ID NO: 168347 - protein, 99 aa, Heterodera glycines
LRLFGSTSFWYLLLLLELYDTAKLCYSGRNKMYSSKQCSGGSFDINYVCQKYTCEGGRSSFTLRTCAMKSTGCIAGTRTCRFSGGKGSCQRCEGDLCNL

SEQ ID NO: 168348 - protein, 148 aa, Heterodera glycines
MLYSIFAGWIGANAAVKSKSRVAIDRSTIGPFQCGPGLCTRMAGISGGIAVAMNAYGAHFVLANADINDERKRAMTYAINHHFINCIGMALAGVGAHYPTLTSSMFLISTVLFSVPSYLFAIRNDRRLRAVTPYGGVLAMLAWFSFVL

SEQ ID NO: 168349 - protein, 136 aa, Heterodera glycines
IRQNAVQLRARTLADLSRSFAVGDSSPSPNTALSYKMRSWSWRTFRQSRLDDVSYADDWFHFGTSYRTFPVLEKFDRRDYAAIPYTYWSRAYCTELYPSDRTEIYRRIYEPYRDEYSYKLWNASRRALLSRDNRLM

SEQ ID NO: 168350 - protein, 147 aa, Heterodera glycines
MLSPFSYDPFYRRSLWPMATHVGNVLSPFRQLERELDHFFEGMQPMLRDHVAQLNVSDKGDLTYKVDVSGFRPEEINVEVIGNEIIVNGEHREQNDSESVHRQFSRRVLIPEGIQKESIKCELDGGRLFISGMKTADKGSSRKGRRK

SEQ ID NO: 168351 - protein, 132 aa, Heterodera glycines
ERFSVFASLFLSVVSLAFASSTFHTDFWILSDVMRRNGTESNKNQMNSGLFHGIRQLDWAFGPKRKHFSVLEELQSGVSFMDRNVWFALLLSIGLGFLWNIVDLSVTVKNCTKYGNGGKKIMPDVGTVIVGP

SEQ ID NO: 168352 - protein, 107 aa, Heterodera glycines
AKNWLAELFGTLSSFCWSIKFFALRSKIERKCSLNQSDTFVSVLPAVTQRHDNDGRRVTKHTTNQILIHQHSHHHHEHHSSRHITPFFPHQTTSFTHFTTSSTPFAG

SEQ ID NO: 168353 - protein, 104 aa, Heterodera glycines
MFRIFGRFVGTYPIAFLIFSLILASLSGDPLLTTVMLRARDRHSMHRLRWLDECVRMHDFLRLNISATVGGQLTNVVTFAIGALTPTPGKQFTILWLHKSQAEE

SEQ ID NO: 168354 - protein, 77 aa, Heterodera glycines
CYDNKQRHGDWLEAFDPRQQKKIDADYALFVAGHDPPPKCKKYREADERILRLTQNFNPLNIMEFLIGVSRNYQMDA

SEQ ID NO: 168355 - protein, 98 aa, Heterodera glycines
METENAEETQQQRPFAIKRWNLVSTWSWDVECDTCAICRVHLMEACLRCQADSKAQECVVIWGECNHCFHLCCMSLWVKQINRCPLCQSDWAVQRVGK

SEQ ID NO: 168356 - protein, 123 aa, Heterodera glycines
EDPPNAEPIETVEKFESEEVEKVHMSMGAAKKRFDHCLLDSEGADFSDSVGVRRLKRGFKASEVFESETIGSEEEETLEQKFNRLNREIRNLAAEVEQSQNESPSVKKEDVAALDELLKTIAS

SEQ ID NO: 168357 - protein, 142 aa, Heterodera glycines
LRYCIASSAAFTGAALYVSLVDHPTRLQLDTATALKQWKKCYSWSMPLQAGLALSSGILAFVNIVEHKQHIWTLGSALMLVNWPLTLIFILPLQKRLMAVNEASADEKTRADLERWGHLHGMCATLGLMATGVFLAGRFVLK

SEQ ID NO: 168358 - protein, 92 aa, Heterodera glycines
SSAHLQSHCSSGWFSHKGNCYTVIAGGWSAKSASANCSIANATLITPKIIESDEEEAFLRDLISFNAPKKNGQILVGENIDIFICRKAMGKY

SEQ ID NO: 168359 - protein, 123 aa, Heterodera glycines
LVSLISDKNYERRIHGYVSVLQDERWRRLYAVLKANLLFLFESSERLEIPVLLIVMEDFVVELADDNTMGRQNSFSIKFNTTGHNYIMAATDYDALQNWISVLTSCSFEFMEATRQSLESVEE

SEQ ID NO: 168360 - protein, 113 aa, Heterodera glycines
  unsure (1)..(113): unsure at all Xaa locations
HWVDRRFRARRFMNTDPNFWSRCKWYSDYWEPCNWRCDXYQHYDRPLWNXWKPDISDGKNQKPAIDMCRNGLLSFAYXDQRRITPGALGQKEKDWADIYPPDGKYGSLQYMYS

SEQ ID NO: 168361 - protein, 78 aa, Heterodera glycines
QFVRSTGAVGVACSVPKRRRFVPTTFCSDDVSADDVLGTQMSRFHASSSVKLPTLFRSPILPRLLKNQSPFHCPILSL

SEQ ID NO: 168362 - protein, 148 aa, Heterodera glycines
PAYLAPEVFERVGHNQSVDYWALGVLIYELMAGDQPFWGKCPEDVYEHIQETKENGLRFPRRTFSPNAKDIIRGLLCIDPKQRLGCDQLKKHPWFSQYEWTELSNRNYKPPFVPTIYHEGDTGDFDSYQEVEHMAPAKQCYLDLLDEW

SEQ ID NO: 168363 - protein, 105 aa, Heterodera glycines
MNLSDEQLDELKWRPKRHTKLDGTQMINSSGQQNCSDENFILSTLLRDYDKFRIPGGGNVRVEVEIWVQEVSKIIEITSEFELDIYVTEMWTDPFLAFAHLNPCK

SEQ ID NO: 168364 - protein, 82 aa, Heterodera glycines
ITSITSLKMPLFSAGHPLPLKSLGPFPEFGPNYSSPYFTRTGTYSFPNHYHLQNDRFYSAFFRASYRSTDYSPESLYSSRIA

SEQ ID NO: 168365 - protein, 123 aa, Heterodera glycines
DRDHLQPSTIANIVHFLVNDLQRMQRMTDILTDFQVDWMEYNQLTWAVMFFIVEECHSLPISEGTIVMPTLSFLFAGFTNPFLTTFQDFFLHIVSDSFVDPRTPSWQKEVLTVGIESKKAISD

SEQ ID NO: 168366 - protein, 142 aa, Heterodera glycines
TEKAPSSELELSFLCEENEEIAAPNLTYDDNQSGKWILSFEIGDVLDTKWKMARDLYNSKKLDGIVGMKVSTNCPRTRRGNTGVIIMYCGPFYDRNKMLDIGNNILAKMQCTAPITYKADFQTLSGVEETLYTISPEGSSSS

SEQ ID NO: 168367 - protein, 53 aa, Heterodera glycines
FLNFKYYIFCNIIISQSIIANVLIFPISRLSPLGNLLVSRHQSMFFTPVSINL

SEQ ID NO: 168368 - protein, 175 aa, Heterodera glycines
MVNWCCFKFWFCFRLLLASIAHFNWFAAIYVNCIFFTLWKSYDILWFWTHLALCVCFPALRPNNNLIVFVKLVRAKCTDHSSKSFKEIYELIYSDTPDETNAERELRRIETQRKESKRRAHERIGKQKKHQKQMQLEEDESASSDSDDDSSTIVQMQGIYPILSYCQQMALCCRL

SEQ ID NO: 168369 - protein, 50 aa, Heterodera glycines
LKSWPVDHSQNFDEYLEAKGFGWFMRQAVNLACITKTFSNNYNCTYACKI

SEQ ID NO: 168370 - protein, 52 aa, Heterodera glycines
FFFFFSMQICTTLGNFIEVVKVSKGTIAVYRITYLPANVGTSHKCFSTSTSV

SEQ ID NO: 168371 - protein, 135 aa, Heterodera glycines
LPLSTENPHKLIHSSKHSHSTSSTTSSIHGQASAPSKLTLREESGVRGDESTELALFFFSLWLNVQKKNRGVFCTIFVAEVRRSMPISVVVFGIEEDDEIVVVVEVNIEEPMACDGVFEDKIGGDLAKRWAERRA

SEQ ID NO: 168372 - protein, 77 aa, Heterodera glycines; identical to SEQ ID NO: 146566

SEQ ID NO: 168373 - protein, 68 aa, Heterodera glycines
VRRVCPSLALARTEFSLQFDLCPEKSLLEQNYQCAECFSPIGFDDDSEKLPRICDFTGLFCCRRCHWN

SEQ ID NO: 168374 - protein, 49 aa, Heterodera glycines; identical to SEQ ID NO: 146915

SEQ ID NO: 168375 - protein, 125 aa, Heterodera glycines
  unsure (1)..(125): unsure at all Xaa locations
PKRMNAVIMNVYNPNATAIIFGTGKFVCTGAANEKECRQAAEQVTERIRXCGYYDAQIQEFKVRNLVATADVGFHIRLGPLSDFLGAKYCSFTPELFPGLVYRNQNPKISIIVFSSGKLNLTGSK

SEQ ID NO: 168376 - protein, 79 aa, Heterodera glycines
ITNNRLTYFSGLIPYNSCSSRTLQNISHLNLSCPRNLHKSSHFSFDPSLFNTEPKKSPQKKAKRISTTNMLINLRCSYS

SEQ ID NO: 168377 - protein, 182 aa, Heterodera glycines
RAFPSRAERVRQWMLFSRQWHAIDADRQDVWKLAKKVAKHLSGWSKPIHHPHTDCGDHVVVVNCSAVSMHAFDWKHTHFFFNRLYPKSKADIPAYQIHEYDPCRVVWMCIGRELAFLTRNRVVQRRCFERLHVFPDLEVPDSVRKNINNQLRQVQEVPKKSTEYSAEERAGFPLLFAQEKLS

SEQ ID NO: 168378 - protein, 133 aa, Heterodera glycines
FTKMSSFWNVSAVLMLITLISLLVNSSEAVPLPSKKSSSLWSKLFSNDRESAKKLGSPSSTSAAGGEFSVQSKMFIPYANNGNGGFFLPYPSEMDTVKRSNTEGHFLDPYDGGSSWLSLSDPSRLEWNFNRLR

SEQ ID NO: 168379 - protein, 150 aa, Heterodera glycines
AIPMPPPPTQDEKDQQKKSQWKPLEIGTTKIPDPEELPFGIVQTAFRASDRMRTTSEDSAESFDAYGPEWEGKGRGIGNRREFSSPNMTSSGRRMSITERLFGRPVPQERRNSLGEEQMGQEKPKSIAENKDFKELMKRQRKILGDDEWQ

SEQ ID NO: 168380 - protein, 84 aa, Heterodera glycines
FLCLNNQNPATFSQILLILWLIHLLLMAHFIHSLLCLSLVTKLRRILGPISNSIWQLSEGRINYSLMFSINLLFLIIFVSFFFN

SEQ ID NO: 168381 - protein, 119 aa, Heterodera glycines
SFYRNNQLPFRHQPDNSDSANRKDYENNSNKERNDNGNKNSYKEKQRKNESDGEENEEERTRRRIEQRHLGKGKEEGEKSWTREGEKGTERREEMAKSESILNALIEQVRHRSEVCHGF

SEQ ID NO: 168382 - protein, 123 aa, Heterodera glycines
SFPIRVAVSNCCRIWRLLISKSYVRDVGTTSKDGHADADILANADVVIMNNVFTFFADHAEQVSCWQHLRAYLRPDTLLLPLALAGVGHCPSLSVGTWLCLRRLVTSAAHWHCSDEHRCFCGN

SEQ ID NO: 168383 - protein, 176 aa, Heterodera glycines
APTLRLFVFVLLQFVVRPLVIHSMLFPPFVLLLAPIPLAFSIWPIVLAEPVFALDHLSLQNRATDEKHSSASTSPSLLSSVALTKCQSDYLSALIHRCMIRGVPTAMEGRICFADEVQLADVHKLVNYISEVCCLLRCQAKTLERLCCRHAQQQGRCRKANCLPIRDQKVLWEEAH

SEQ ID NO: 168384 - protein, 65 aa, Heterodera glycines
TGKKKTRKLRGHVSHVHRRVGKHRGHPGSRGNAGGQHHHRINFHKYHPGYFGMASMRNSYVLKNH

SEQ ID NO: 168385 - protein, 176 aa, Heterodera glycines
  unsure (1)..(176): unsure at all Xaa locations
IFLFIVMINALGCSNAQLKCRRDTVGTINGVGLKMNFSEEECESTYFWQSAYKYCYASHCLRGNEWLTHYGCAKSPEKGACSDNVEKEMKDLYGLAVSCSFCTIGRKMDDMSNKNFPLYNTTNVVMPPSGGADGDDFSFMSTTQQLTTSYNLSEIATIVPKKMNXHEMVTSTPTPN

SEQ ID NO: 168386 - protein, 103 aa, Heterodera glycines
HFSKNDQIFLHFFPNVFSTYSSSLSPFCALCAPSARFGQCADSKCHSVDHSDPRDQSRGCGQQIIGVVPRGVGPHGGTALERGAILWPTMKKRSEGTDGPFEE

SEQ ID NO: 168387 - protein, 82 aa, Heterodera glycines
YCLWNGFLGSDCTIRLPWFSSSFWRGFLVIGVVIFRPAPPPPPPNLLPGFCLLLLRFSDGVATAGEEVEETIFSLTIEKKEF

SEQ ID NO: 168388 - protein, 96 aa, Heterodera glycines
STQLLFHITTVSLVPTLIIGPKLTFFKNIGSSITKSISNSDQYQIEPKKHYKILFIIGPIDKPKKKMEFVTDEKGKIKWNFEKEILENKFTPKGFK

SEQ ID NO: 168389 - protein, 153 aa, Heterodera glycines
EFSIELSDCLLTVSARRRNYSPNGLFQLPFFCVCSLLILFNSNSVFTFILSLFQNFCSADAFAPKKVVSSFPMASTCWNCPNCSFRNFVTRRSCRRCDYSRTEEEINKNKTIWPCSECNSINYIDRKTCHKCGVSKPENVNSNRGETAADGSW

SEQ ID NO: 168390 - protein, 61 aa, Heterodera glycines
MSVVVERVNDDGTEGWSDNVPITKARMAELIRHFYNLGWMRDNGAGMAVHFKCPKTAELLI

SEQ ID NO: 168391 - protein, 125 aa, Heterodera glycines
MDGLFFASIAFLTTVFSVIGIAIVKLWLDERNSRKSKETLVAMDDSATDGNMQNEVMDSDEDEQLTGNGAAEEAMLDQEGTTFSEKRIGKKKLAKLQAKAEAKALREQEQTEREERKQREKEIRK

SEQ ID NO: 168392 - protein, 75 aa, Heterodera glycines
  unsure (1)..(75): unsure at all Xaa locations
LDHCPLLIRIASLGRPLLILCSLIAFKRNRLGRRFLTQRKPMDEELDREIQMHNMLRNSPDLAQLHQVVADEQRX

SEQ ID NO: 168393 - protein, 129 aa, Heterodera glycines
PNFEMLFLSFPSFILRQIRPSFCRCFSFLLMLAMLFDLISIGRSLPLGSTNDRIYFSNALRDPKDIVLQLVTVPPPMLKFADFSNKFVRLEKRRRQFGPVQAKKYERNCFFSPVQCMLVFRDGSKLYGQ

SEQ ID NO: 168394 - protein, 106 aa, Heterodera glycines
FSTNFLFHSSDERCQIEVFINVNSLLPSKCLSTSASKRGEISANLRTVKMRENVHPNVVAIKCTHYKATSSLGSAQCPSRRQTRHLRHFQCTLFELGEVIRNSKIN

SEQ ID NO: 168395 - protein, 111 aa, Heterodera glycines
RFHDSVLEAVKNKLLQTREEADKAHNEVEHLKRELMEEREKRKLPDQKLKYAQKEAEEAKTELVLIRQRISEERAAREKAERELSVLKQILEDDTARRAQTDTLRNLYPRK

SEQ ID NO: 168396 - protein, 97 aa, Heterodera glycines
  unsure (1)..(97): unsure at all Xaa locations
ETLTAEQLQKMLLDAEKSGEYSYEELLPIREEAKGMIENEEQMVSLYTTFIYMSRRFAEREKSSPDYSRTEETLXRGFEFSSRKCFDKFFRMPAIRI

SEQ ID NO: 168397 - protein, 84 aa, Heterodera glycines
SQRFIKAMKDEEEYQNNRVRPFEIDQTRGIADRPRLKKYIENDSAIRQLVIAYDAKEEKNDDDLIRHIHALQYRVGMKGFEGWD

SEQ ID NO: 168398 - protein, 24 aa, Heterodera glycines
NNNNNNNNFLIFFLITHDIIPWLN

SEQ ID NO: 168399 - protein, 164 aa, Heterodera glycines
RVRNMNTIIIVFLIPICCIFLANFSQFVHAASKNVCFGYDHQFQVEAYYGHVMKHIFDTRECQVSGKQCVEINPRKWTGLAPNEEISFRLRNGTEVGRAIVAELTDCSVVLMMKKRIYFSWDIQTLHISAFLSSAIFYNDQTETENLNGWTYKQYLEIGPNMWV

SEQ ID NO: 168400 - protein, 76 aa, Heterodera glycines
RYKCSLKDIYLRYLIVRLASVISGTKQIWVRERAAAEAAAILYDPAIGKNVLFKEVEQVKGKDSFPDRVKKMYNIS

SEQ ID NO: 168401 - protein, 134 aa, Heterodera glycines
DLDELETSIDQFRTFLNDQPRMRTLLALKPEVHLLLNHFVPFARQHQFLALLDEQGDEALHSVWRRLEQLWKTMPDEEQMRQLLEHHFVSNWLLDTGKIDEMKRNKNKKLVTDVRRTKKAMEKNNSILNKHSWI

SEQ ID NO: 168402 - protein, 71 aa, Heterodera glycines
AKKSQITDFTCTFLQQVLETTAEQLPLPIRAHLSNMLYPDTKIIKSQIPNKLCSVCGFDLLKGLVVVAQKK

SEQ ID NO: 168403 - protein, 203 aa, Heterodera glycines
VSFSLLLFGLFTIRTAKSQCEKHCTKSKPMGQCNEAEEVILRNSDCAFMKKTETAFEFVVGMNGQTEDKTAPGANANGAFLCCKATQGTATLFIVGVANKRLMLAKDVVNYKFHNNISIDDFVREKQVLESVSAQGQKAGIGDNYGEKFFQDQMDANKMIQKGYVKLWAANKSLLPQNVPDLQKDTRPKVTAATEEMILALKV

SEQ ID NO: 168404 - protein, 52 aa, Heterodera glycines
FFFFFFFFEENSFLSNLCQFIENITYRSPSPCNSAVVLRVCSLPSRRLPAIG

SEQ ID NO: 168405 - protein, 176 aa, Heterodera glycines
KNSSGVGRRLNDLHVSIFNLLQQWDKENQNCCELLESICQCRIQMMDRMKANGKADNEADLHRQMFITDVILRNSELLCTSIAKFDSFLLRLRKFGPKLAALSDLISSTSSNDTSTSPDDPHQLLQFRAKELLDLFPIVLEMYEQELSFKRDSVVDLAALDDKDLFTAIISAWKHG

SEQ ID NO: 168406 - protein, 47 aa, Heterodera glycines
INRKTNKRSVKFRMTFIFPSFHIGLSDKVDDHQMENYMGEDEIGKGP

SEQ ID NO: 168407 - protein, 59 aa, Heterodera glycines
IASECINKSVCSKKRMEYTRGDDREKLGHHFPDEIMNELSIKKLDQIKVKIPRSSSCII

SEQ ID NO: 168408 - protein, 138 aa, Heterodera glycines
  unsure (1)..(138): unsure at all Xaa locations
IVRDWKPDVVYLVQFPRTHNVLSPSPFALKLETWLRINGLKYRNVNNEFTKASAKGQIPFIELNGRQFADSNLIIDHLRNHFKVSXIRASARTNRALGRAFTILIEESLFRCLQYDHSIDFGWLATENGWAVHMSGFK

SEQ ID NO: 168409 - protein, 84 aa, Heterodera glycines
MVNFTVDEIRALMDRKKNIRNMSVIAHVDHGKSTLTDSLVSKAGIIAGAKAGETRFTGQVVTETRERKGLKEGIPSLDNFYDKL

SEQ ID NO: 168410 - protein, 76 aa, Heterodera glycines
VCGPAELGSILKWRKKLVDEQKKEEKASKESVKSAEEMVEGDTGEELEENTEFKELEEIDDLIRTAKAEEKATLKK

SEQ ID NO: 168411 - protein, 99 aa, Heterodera glycines
MCLLSGPSKKPTSWSIWTSPLAFMITSLFGSSTHTARTFLGWPAASSASIISRTRTILIGLLIFGQIYALAERERFFVCIKSQKGIGHLHCSTRYKMSR

SEQ ID NO: 168412 - protein, 56 aa, Heterodera glycines
IAANVDNVIKFATWDMFYEARRILMADLEIVSTTVVTFWSDDSLKLKTQPYQFFEF

SEQ ID NO: 168413 - protein, 159 aa, Heterodera glycines
MHCVRGKKCKSVPGMGPLAVRSSAIPLATLCLLSVLFLDQMLGTTALRCYQTQSTLMQPVQGSPTDCPMMGLSCIKSVDYSQGLVTRACQSNNCTMMSGYSCQNTSSYPPQTFCCCYGDGCNSSLRLSSFGTFPLLLGSVLSATLAFGGAKWLKTFIGM

SEQ ID NO: 168414 - protein, 53 aa, Heterodera glycines
IIIKLIFVHEHAASADELLLKPYKKISAGETSHENYHTAKVKKKKKNSRLVLS

SEQ ID NO: 168415 - protein, 55 aa, Heterodera glycines
IFLVQSSDNTCFFIQNVHTGIQQQQHPNVQPGTKSVSYNPGERSERMSSSGSGTT

SEQ ID NO: 168416 - protein, 93 aa, Heterodera glycines
KVPMVNSSFQSSKSSFVSERRSFSVRRTAQILIINELKETVSLHSSRSSVDHNLLKQVDTLQNHNSSIHFRAFVVVATTHISWQNAQNAKSPN

SEQ ID NO: 168417 - protein, 80 aa, Heterodera glycines
MLSLYTMLEFSLLVLNGIAIINRERVLNKYLKNRQHSFGAESEQSVVFRLVNLIFAVQTVLRVPLIVMNIIVIIIKLLFG

SEQ ID NO: 168418 - protein, 98 aa, Heterodera glycines
RLNILRYSFHNFHCDVSSSSSSSLIHSFSNFFSLLDLALIFRLFFGRFLLGTMVQSFFDAGRRHCDGNARGRSDGGTFGQLFAGHSAFFTNYNWSSHQ

SEQ ID NO: 168419 - protein, 62 aa, Heterodera glycines
SVPLPLLSFPVCPCFCSILSRHFPFGAIKFQRQQRKRGILPTKITLCPIDTLSPPLPSLSLK

SEQ ID NO: 168420 - protein, 188 aa, Heterodera glycines
  unsure (1)..(188): unsure at all Xaa locations
VAKISRDELLEFVRNEVTCTIGSADAPVAIPVLITTFREDTNEDILQLAKKLGYPSIEAMLDSVELSDIVEPCFTDLAKGAGNENPKKVXSYRIKNIPMVTHILSSIEESAQHRDKKAEEQRHFEILIGDPKYNPKILAGKEQLLSLIYNLGGQERFVDLLELRKLYEHNYFKELNKAALKEFFPTGQ

SEQ ID NO: 168421 - protein, 90 aa, Heterodera glycines
MRATNGRLGNLVRSPLARNKYLNNGEAKMQRRHSSAGEEMPRAVQFDESSDQYRCLCGCFHVKTGTYLIASNLKMAPNLVPEKKFIPVYS

SEQ ID NO: 168422 - protein, 114 aa, Heterodera glycines
RTYKEENSFDKRRAEGEKIRRKYPDRIPVIVEKSPNSRLRDLDKKKYLVPAELTIGQFYFLIRKRIHLRPEESLFFFINSVIPQTMTTMGQLYQDRHEEDLFMYIAYSEENVYG

SEQ ID NO: 168423 - protein, 44 aa, Heterodera glycines
FFFFFFFLIFEPLNKRKGRKHTNKNKKTHPQSSSTKNTQHNGSI

SEQ ID NO: 168424 - protein, 92 aa, Heterodera glycines
  unsure (1)..(92): unsure at all Xaa locations
SILXTSGKNCSSAANISLSVSSVREQTVLITPQIWAEVIGGRVTVALTVVRCFKVPIIHQAVFVLVKSLAVSVEGRVRIVRPIVRNASVGFN

SEQ ID NO: 168425 - protein, 87 aa, Heterodera glycines
FQKPVVPICEKDVPPTDKIVVDRLTIHKSCFKCAICDKPLQQGSCNLERGLARYGTFWLCREHSLIPPGEKEDLIVKKGYQVKTKKK

SEQ ID NO: 168426 - protein, 159 aa, Heterodera glycines
  unsure (1)..(159): unsure at all Xaa locations
SFVKFCFSRPFSLGNTRNVTTHFGFTKIDVADKQEKVRTVFANVATKYDLMNDAMSLGIHRLWKEYFVQQLNLSKDSTVLDMAGRTGDVAXELYKXMRRQPIGKGSITGADINDNMLETGKTRATRALSPSDRARLSWVRADAENLQFEHNTYDFYTIS

SEQ ID NO: 168427 - protein, 79 aa, Heterodera glycines
YEEKLKKFEELKKIAADLEVLDQKLDLWKYASRSLADLQRARKADEQKQKEKVLTVLFYGYLVIALSIIAYSVIRVITM

SEQ ID NO: 168428 - protein, 147 aa, Heterodera glycines
TTVAVLSPSIYLVFIIKLLYDIQINRRQLSAVVTELSAVQRKTFLQVFLISSINTMTGSICLYMQYNEASQWMITLAEFAWFHVHGFPPVIYLTLNKTVRQDCLKLYMKLFNRNRVSHIGGVTVLRPNRPQPQQRQNHLSTESPGYT

SEQ ID NO: 168429 - protein, 88 aa, Heterodera glycines
GFSTKPIIIDGKDHLLGRLAAVTSKQLLLGQKIVIVRCESINISGNFHRSKLKFLAFLRKRCNVKPSRGPFHYRAPSRIFWRTVSFHI

SEQ ID NO: 168430 - protein, 99 aa, Heterodera glycines
NIQINKLSFPFQPFDPFRLSFPPMASFPLPSFSATHHRPKSFADPSLILTSLCSPRCFSASPAPFVPLPMRFFAPGAVHVHLSAMRCSFVSPNWSYMAN

SEQ ID NO: 168431 - protein, 77 aa, Heterodera glycines
  unsure (1)..(77): unsure at all Xaa locations
LAVSPSPFSVLDGDRVPTVDISQNTAEYRELIPEEVTXFYHELTEDDKNALNEVAERHEEFRTEEQAMEALNEKSGK

SEQ ID NO: 168432 - protein, 70 aa, Heterodera glycines
SRVFFFFFFFFDDNFLYQQSIKMYESTATSQIIARRLPPVHLRLQLQFGSAPMTTFCVVTNSIARLHSNP

SEQ ID NO: 168433 - protein, 70 aa, Heterodera glycines
  unsure (1)..(70): unsure at all Xaa locations
IPYLRDPXVKNLMKSLCAYSFLILSVPLGSMFLLKNCVFXSIFCWHSRDSMLYSAIVAAVMVHLVLFVWI

SEQ ID NO: 168434 - protein, 80 aa, Heterodera glycines; identical to SEQ ID NO: 140683

SEQ ID NO: 168435 - protein, 82 aa, Heterodera glycines; identical to SEQ ID NO: 124410

SEQ ID NO: 168436 - protein, 122 aa, Heterodera glycines
  unsure (1)..(122): unsure at all Xaa locations
GLEKGNGRNGVRGEEEVKGGKEIASKTLNIQSKRFYLDVTQNDRGRFIKLAEVAMNGRKNRLIMSVRMCKNINEXSGKIDGHVPSVEEVNGKAENVTIQSESIVTDRRRYYIDLRENRRGSF

SEQ ID NO: 168437 - protein, 92 aa, Heterodera glycines
NQITHSLFNCFLRPMSFSVLSLLSNCFSIFLTQNVQKSVRFLHRLQLRILNGRLSPEQRSDQKPCGPSDRHRVGHLANDLFVEQKISKEPVD

SEQ ID NO: 168438 - protein, 24 aa, Heterodera glycines
RELVSSFFFFFCRFGFLLIICCCR

SEQ ID NO: 168439 - protein, 118 aa, Heterodera glycines
FLAGSIFFSALTVSWVLWDNRNQQHKRTSSVRSILASAQRQKNMEEGAAGPRPTSDLPIRGKTDHPSRRSFHPYDRSPFSPSPIVSPFVLFLIAPSPKCVSRLARMAAPSNSIKCIVC

SEQ ID NO: 168440 - protein, 85 aa, Heterodera glycines
AEILKNSSNCQKRRNSPPNPLRVDVIEGQLPKLFSAAQHAHLQVLLHKARISDGFALALNKRKCANGLARKRSECLMRLLISFNF

SEQ ID NO: 168441 - protein, 103 aa, Heterodera glycines
CIIIISINSFIFQFFSLLDLAVIIRLFISRFLLGTMVQRFVDAGRHHCGGNARGRSDGGTFGQLFAGHSAFLTNYNWSSHHHCWKHQSFNQQQNANYSEAIHF

SEQ ID NO: 168442 - protein, 106 aa, Heterodera glycines
ILSHSIFASTSNGLSNFWNVFNTDDQDCDEWSADAEDKEFSNNYQWLHWGPISATLLVVFAGFSTSLVHVPWWDISTISGALVFMLFLLWNYLVLRYLYLACLLGP

SEQ ID NO: 168443 - protein, 94 aa, Heterodera glycines
TNILPIISIFASNCFIVASAFLRASSSSVFPSVNFSHFSISSWAYARNVFSFRNVIRYFVPQLMVPRERYAVIGLRPTLMAPNFEPWTFGHKFG

SEQ ID NO: 168444 - protein, 90 aa, Heterodera glycines
  unsure (1)..(90): unsure at all Xaa locations
MDNYNNGFDLTKGVDLKTASKFFANRFACGCSVTVDSADELVIQGDFKVKVCSPSHTLPFCXLKDKLFVEIPKKWGVDEEVIEDLDDQKK

SEQ ID NO: 168445 - protein, 105 aa, Heterodera glycines
ASDGAIERFLVRGYGRCKFHADILEEVQASEGEKAIEFSCVGGGRIKHEPEAKRIFVYGYSQVQNSQKDFYRLFKGFGRADHAKSVEILRERYPNYTIEWSNEGY

SEQ ID NO: 168446 - protein, 96 aa, Heterodera glycines
  unsure (1)..(96): unsure at all Xaa locations
IFKVVLTGGPCSGKTTGQARLLSFFESIGWKVYTVPETASFFLGPGRIRFPDLSSEQAAQFQTDLLKALIQNEDVFFNQAEFSEAEKIMIIXDRGR

SEQ ID NO: 168447 - protein, 120 aa, Heterodera glycines
PSINLWTNLPELKLDNEFRRTFLATVANSMQKPVESTALIVQSGPNCCQIGSDPAEPAMILQIKSIGCVSADENVIHCKNISEFVQSRLGIPPDRVMIHFQSLEKHEVGKGGTTVEKMCQ

SEQ ID NO: 168448 - protein, 75 aa, Heterodera glycines
LIAIFNIAICSFILSTVCQCVDSVQLSLTELGVPSVVESPYSGEVHVASVGPISAICHLLFSDLCVHKNNATGGQ

SEQ ID NO: 168449 - protein, 84 aa, Heterodera glycines; identical to SEQ ID NO: 156507

SEQ ID NO: 168450 - protein, 101 aa, Heterodera glycines
  unsure (1)..(101): unsure at all Xaa locations
CGGESEGDGDWGEKCGHVCVGDGEEEGESGEEEWSRERRRERGGAESGERWREXERERERWRVESEREXEKEWMEERRERWGRERXERERESEREKSERER

SEQ ID NO: 168451 - protein, 155 aa, Heterodera glycines
  unsure (1)..(155): unsure at all Xaa locations
MPHSPLNRRTANPSLEASSPTYSNKRVNADQIRQLCPFPPHXFTSSLTLSSKCFATFPHGTCSLSDSWPYLVLDEVYHLIWAAIPNNPTPRHVKMDRHRQLDRSCTFSGAPVKGNLNKRANPSSRSIRYTSQPQRSCDSALDSSQFTRRYYGNPR

SEQ ID NO: 168452 - protein, 272 aa, Heterodera glycines
MSRNRLPPELLLEIVLCVRRGHNTPNICFSSRILRTFMEPRVALWRRVWISMLRKLSDAYLKALLTSIWNYVPLDENCQMFFGTLNGVFRQLEDREIAANCLISGRGGIKGQIRLAQGAEKVLSVSGQIHSPSIEPDRMEVHDLGNVTAGSSSTGRSLHTLCTFASVGAANDYVPAGVVTAPLALSGSKINCIGRSLVVFQEGRSALGSGVIGYAKDTRIFSDEFDEIFRNLITQYRNVNVSDCWLVLRDGTSSNPDCRAFFDMLDEILATE

SEQ ID NO: 168453 - protein, 214 aa, Heterodera glycines
FEMLRKLSDAYQKALLTPIWNLVQQILDENCRVFFGTLNGVFRQLEDREIAANCLISGRGGIKGQIRLAQGAEKVLSVSGQIHSPSIEPDRMEVHDLGNVTAGSSSTGRSLHTLCTFASVGAANDYVPAGVVTAPLALSGSKINCIGRSLVVFQEGRSALGSGVIGYAKDTRIFSDEFDEIFRNLITQYRNVNVSDCWLVLRDGTSSNPDCRAF

SEQ ID NO: 168454 - protein, 156 aa, Heterodera glycines
MQKIYERPEKYNGGGRVATIPFSNGALPTNHSLYSLPVRYPKGLCGLANLGNTCFMNSALQCLSNIPELATFFINGEYSEQINTQNPLGTQGKLAQEFAELLKNMWSGRYCTFRPFRLKCVVGMFATRFNGFAQQDSHEFIAFLLDGLHEDLNRRI

SEQ ID NO: 168455 - protein, 355 aa, Heterodera glycines
MGHFFPGTVSFPIFLFMLGSARCWWHFGAKQPRVFASSHAQLTPPEGIESADLRMPGVSPQMNESYLCSAFPLDSERDHFIVGFEPVLSSRHIHHVIVYGCEMPGSEDKAWDCGEMASPRGSYSHSPVCASQPDIVYAWAHNAPELLLPDGVAFRVGGSSAVQFLVLQVHYMRAEEDDTSGIRIIHTDRPQPRQAATLLLATDGRIGPKRKEQLEVACVVDESVVLHPFAFRVHTHRHGRKVGGWAVREEPKSGTDKWTLLGQRDPQLPQMLQLVANQSVTITQGDVLAARCSMENEEKREIKIGPTGEDEMCNFYLMYWTKNGQTLEQDMCFSPGPPIYRWTKSAGLNHTPKRK

SEQ ID NO: 168456 - protein, 63 aa, Heterodera glycines; identical to SEQ ID NO: 157419

SEQ ID NO: 168457 - protein, 190 aa, Heterodera glycines; identical to SEQ ID NO: 163867

SEQ ID NO: 168458 - protein, 57 aa, Heterodera glycines; identical to SEQ ID NO: 163441

SEQ ID NO: 168459 - protein, 438 aa, Heterodera glycines
  unsure (1)..(438): unsure at all Xaa locations
MLSRMLSSAVAVPRMCESNKKLLRKGATFVGLLCGRMANSTFTATVTPPHRLLRPLHINEKKLFGPGPNNMPPLVQEGLVQPLLGHMHPEFFEIMDDVKAGIKYIFQTENALTFAVSGTGHAGMECAILNLLEPGQTILVVQNGVWGLRAANLAERLGIKVHRLVVPEGEVINLDDFAEAVDNYRPQVAFVCHGESSTGVVHPLERFGDICNAYDVLFLVDTVASICGAPFHADALKVDCVYAATQKVLNCPPGLAPISFSEKALEKITKRKTXRVPSFYFDALELGNYWGCFDEPRRYHHTAPISLVYALREGLSAVAQEGIGHMVNRHKINAKLLYDAFDQLGLELFVQKENNRLPCLTTVRVPEGVDWKAVQDKLMAQGFEIAGGLGPTAGKIWRIGTFGINSNPEDIESLKQALKGALYEQEEKGQSDHFKAAI

SEQ ID NO: 168460 - protein, 198 aa, Heterodera glycines
MEWYSGDVTTALNIYQEKKGILIVYVFSDDVNSTKFDQIWDSFDHSILDRVPYVAIRLAKDTEGANQFAQFFPTPVFPVCYFLGLNAQPLEVLTAVEQMTIERLNSSLAKAFSLYNDQMKEQGFATDAVSFQSKSSENDSGKNTSENVPEPLNATSNDEKLEYYRKRLEEKHKEDAMKKEQEEREKEIMRRNEGKALA

SEQ ID NO: 168461 - protein, 99 aa, Heterodera glycines
  unsure (1)..(99): unsure at all Xaa locations
TAGRWPWKSESAKECVTTHLPNQLALKMDGAGAGHLYSTVIGLYTCLSRSLAMTCRRVVVVALKALXWARPELPPVQILVVVANIQVRSLKTEVEKGST

SEQ ID NO: 168462 - protein, 232 aa, Heterodera glycines
  unsure (1)..(232): unsure at all Xaa locations
KILHKVRLESSSTGCCFPARFAKPVPLAVVSLDSRXTVGISLIHSCASVXPTRHLGTLRESXTPAVYPRLIKFPWLNIQSTGQKSDTVNVHKDHPSPLFXLDSRIPRVRASSKLVVQRQPNAPQAALTTSPRTIPERTARSHGQKPPVSRNSPADPTXSQFFSRSYESNLPTSLTYIILSTRGCSPWRPAADIGTIRQEIQIASLAFSRAVWSARDTTGTAVLYGRNIPISG

SEQ ID NO: 168463 - protein, 52 aa, Heterodera glycines
GYRMIPRMSNLFDFDKSYGQFLVEICRGVLKLAIFRSFVQDLVFMNFLSDWR

SEQ ID NO: 168464 - protein, 46 aa, Heterodera glycines
RGGIVIQSHQIISKIQILVDWKLKQLLNLYNFKSFKFHQIFSCLII

SEQ ID NO: 168465 - protein, 311 aa, Heterodera glycines; identical to SEQ ID NO: 163043

SEQ ID NO: 168466 - protein, 231 aa, Heterodera glycines
  unsure (1)..(231): unsure at all Xaa locations
MISSTAVPRPLRSSNQQKQQPNALTKQNGAHQQKTPIKAREDSRNRNDALGAQKPNGHSPRTPSVPPVNKRYAHVKSKVGSITEYTPSPSRVKIFHESVRVSATPKVGSLQNASHVPAGGNVTIENRKLNFREAAKPRVEDKSEVPIPKSEKKIATQKLEWKAQPKVGSLDNVKHKPAXGGNLKIFHESVRVKCESKVGSLDNIGHVPGGGNVKISDYARSVSRSGDGCRR

SEQ ID NO: 168467 - protein, 71 aa, Heterodera glycines; identical to SEQ ID NO: 162404

SEQ ID NO: 168468 - protein, 183 aa, Heterodera glycines; identical to SEQ ID NO: 162255

SEQ ID NO: 168469 - protein, 134 aa, Heterodera glycines; identical to SEQ ID NO: 163887

SEQ ID NO: 168470 - protein, 53 aa, Heterodera glycines
KFSQLKGSLLCVTPFLVLALGVDDAYLMLIAWQRLRIRRALAFLAQFAQILVH

SEQ ID NO: 168471 - protein, 118 aa, Heterodera glycines; identical to SEQ ID NO: 163983

SEQ ID NO: 168472 - protein, 148 aa, Heterodera glycines; identical to SEQ ID NO: 162932

SEQ ID NO: 168473 - protein, 129 aa, Heterodera glycines
RRSVLSAPANFCSSLSFCDICNRKFISPRGVALHKGKAHKGESSSKLVKPKNMAKCPIATRAVKRGRPRKVGVVPPTFVDTAKKGRAHSIAAVPPIGHQNLLSGRHRTKPTNAATAQQQPNGNVQIPKL

SEQ ID NO: 168474 - protein, 93 aa, Heterodera glycines; identical to SEQ ID NO: 162242

SEQ ID NO: 168475 - protein, 160 aa, Heterodera glycines
MFNNHANHFMPNFCIPPPPPPQLPQPLNSARVFFPPVPHHHHPAYYLQPQHAHPHMNPQFFNLSVPPPPITQNISSLIAANINNYPTRHPLNGTHQITTSERFSKTFHTGHANGFTSKGNGAPLSRSRKRFLEQITNEEGTSGELRIELDTAPKNRQLSG

SEQ ID NO: 168476 - protein, 80 aa, Heterodera glycines; identical to SEQ ID NO: 162332

SEQ ID NO: 168477 - protein, 143 aa, Heterodera glycines
MATSSNSTTTVAEPLPTKTSMKIAELRSRVLIGDLPADFLRIPPVSSSVNLSSAPDQIVAQQPQQIVVPYGHPYAFVNPAEHFYSFVPPHTRGRIAVKIVEAKLTKSYGLPGVRMDPYVRLRIGNTLFETPTCVNGGKSPHWN

SEQ ID NO: 168478 - protein, 328 aa, Heterodera glycines
  unsure (1)..(328): unsure at all Xaa locations
MMSNATKNILGTPTIVDNVSFDPKVSANFLHKAIEEKRKDEIIHLLCTISNQQRQELAREFKQLFGEDLSAKLKKALSGDFEELILALLEPPAVYDAQQMHRAMSGLGXSEGSVLIEILVTHSNRQIDEMKRVYEQLYGHPLEKDIVGDTSGAFQRLLVSLCNDSRDESWSSDPIRANMTARALFKESEVESGVNDVLFNQVXLANENFIQLHLIFEEYQKVSGHPIEQAIQQQFSGDTRDGYLAVVECVHNRHAFFAKVLQNSTKSFLGIGRRDSDLIRLIVTRAECDMVEIKEQFMQMFNTPLEKAIESNCSGPYKDGLLTLVKGN

SEQ ID NO: 168479 - protein, 200 aa, Heterodera glycines
MADEKNMVVEKNTSSSTSATDSSPDGGNYIKEEMLQREVFCECLGGERVSVRASLMFQSQTFANMWKSLNVDTNELPDDFVFPMTSVAVPVFKKIINWMESHVGQQVPEFEEDPNTRERKWFVQTDFEKDFFKVEVEELVDFLNASNFLNLQSLYRHSCQAMAALLKDRSPEEIRDLLGIEDDLTEEHKAEIRPQNVWCN

SEQ ID NO: 168480 - protein, 111 aa, Heterodera glycines
SYQFITLSEPSFAAAFFSVLISAWGKAQTDAEQVENWHTKLPARTISIACACRTTAAPVFKLSSSTTADRSFSFEFQHISSIGRAEGERSQKQAAEDDWKKAWQPFLEIEF

SEQ ID NO: 168481 - protein, 119 aa, Heterodera glycines; identical to SEQ ID NO: 163686

SEQ ID NO: 168482 - protein, 148 aa, Heterodera glycines; identical to SEQ ID NO: 162402

SEQ ID NO: 168483 - protein, 93 aa, Heterodera glycines; identical to SEQ ID NO: 133075

SEQ ID NO: 168484 - protein, 54 aa, Heterodera glycines
FDIITSLVSISFLNTDIWAHIFSFCRGTIPSHSRMNSHKSAQCKSPASDCHNLA

SEQ ID NO: 168485 - protein, 134 aa, Heterodera glycines
LNKYLFCKIKNSANSSNKRKTKKATRITKTATAIDQWVGHRSHGSATARTFLEMFKHQCFCVQNPTDTIGNARLSPSVQFTRKTRIGDAKVETSIIHFQNLFLQSLLLNFCLELLDKMVELMVTAGHFHDAITK

SEQ ID NO: 168486 - protein, 87 aa, Heterodera glycines; identical to SEQ ID NO: 163817

SEQ ID NO: 168487 - protein, 157 aa, Heterodera glycines
TLKMTDIQAYAGPFIVNDVVSYFLKDGVWYYRNAFIPINLECKQPPPAEIVKEWIDKYGSAAPKSTKQAKQKVATPLKKSSHKPKLSSADKDSEMLKRKRKHEQMLSNSSTSSSSTSKPLPVSAQKVVSSSALPTPGAPSPNIPKQKQPAKPSSAPT

SEQ ID NO: 168488 - protein, 163 aa, Heterodera glycines
MAETAETINTTISSPPPESESSTTISAMTDPTSQEAASKDTDLTKEAESEKKPGGISLRIWPPTQKTRDAVLNRLIETLSTESILSKRYGTLKSDDATTVAKLIEEEAYGVASNAVSSDDDGIKILELYSKEISKRMLESVKARSNASVGNGSVEDANTDASE

SEQ ID NO: 168489 - protein, 51 aa, Heterodera glycines; identical to SEQ ID NO: 163642

SEQ ID NO: 168490 - protein, 323 aa, Heterodera glycines
  unsure (1)..(323): unsure at all Xaa locations
MSLSVLDQIKQHSTIVADTGDFHAIEVFKPTDATTNPSLILAAAKIEKYKELILKAVKYAKERAAGQSKEAVIELASNKLFVLFGKEILNIVPGRVSTEVDARLSFDKEGSIAKALSLIKLYEEEGIEKERILIKLSSTWEGIEAAKVLESQHGIHCNMTLLFNFYQAVACAQAKVTLISPFVGRILDWFVKNSDKKEFDRITDPGVQSVKRIFNYYKKFGHKTQVMAASFRNTEEIKGLVGCDLMTISPALLGELAKDSDGGWTDDDRAKCRQXELEQIEVDEKIFRWQMNEDAMADEKLADGIRRFAVDAIKLEELIRSNL

SEQ ID NO: 168491 - protein, 202 aa, Heterodera glycines
MATKPLLYCYWRSSCSWRVRIALHLKGIEFDQRIVNLLNGDQNKDEFLSKLPFAKVPVFVHDNLVLSESMAIIEYLDEKFPEPNPLFPKSAEDRAHVRALALQIVANTQPLQNLGVLKHLSEEPAKRNAWARHWIEQSFNVFEKALAKTAGKYAYGDQISLADICIPPQVYNAKRFGVDMAQFPIIARLDETLAEVPAFKVP

SEQ ID NO: 168492 - protein, 60 aa, Heterodera glycines
GENGQPGQPGNPGPQGYPGDGGSPGQPGNPGGSGEPGQPGAQGSSGQCYHCPPPRTAPGY

SEQ ID NO: 168493 - protein, 178 aa, Heterodera glycines
  unsure (1)..(178): unsure at all Xaa locations
PGGDGQPGGSGQPGAPGQAAPRPYPPSGGCVPQCEAAQPGLPGPPGPPGPEGQNGQPGQSAPPASPGRPGPQGPPGPDGQPGNPGESGQPGQPGKLTQGPPVVGXPGPSGPPGQPGQPGENGQPGQPGNPGPQGYPGDGGSPGQPGNPGGSGEPGQPGAQGSSGQCYHCPPPRTAPGY

SEQ ID NO: 168494 - protein, 248 aa, Heterodera glycines
QETHIVLGIASVCSLLAIIATVVTLPSLYSEMSQMNSKVRNGVEAFRVNTDSAWTDLMDVQVVVTPPSKPRANPFNSIFRAKRQLPGHCQCAGLQQPSCPPGPPGPAGPPGQPGQPGSAGQPGQAGQPGQPAAPCPPQNIPCPRCPAGPPGRPGGQGPPGQQGAPGQPGTPAQGGGPGTPGAPGPQGQPGQPGRPGASGQPGQPGANGVVSRPIPGPKGPPGAPGQNGNPGGQGQPGQPGGQGPPGPP

SEQ ID NO: 168495 - protein, 275 aa, Heterodera glycines
  unsure (1)..(275): unsure at all Xaa locations
MQETHIVXLGIASVXSLLAIIATVVTLXSLYSEMSQMNSKVRDGVEAFRVNTDSAWTDLMDVQVVVTPPSKPRDNPFNSIFRVXGQLPGHCQCAGLQQPSCPPGXPPGPSGPPGQPGQPGGXQGQPGQPGQPGQPAPPCPPQNIPCPRCPAGPPGRPGGQGPARTARSXGQPGTPAQGGGPGTPGAPGPQGQPGQPGRXGAAGQPGQPGAXGVVSRPIPGPKGPPGAPGQNGNPGSQGQPGXQPGGQGPPGPPGAPGQPGQPGXSGQPGQPGAPG

SEQ ID NO: 168496 - protein, 170 aa, Heterodera glycines
  unsure (1)..(170): unsure at all Xaa locations
MARTKQTARKTQSQKGFSSSSGSQHMQSQLHNLRKQLATKRPNPKRGIGYKELPPVKIAQKRHHKKGALALKEIRKYQKSVNLLIPRRPFMRLVREVTQDMSQSTDLRWQGLALLAIQVXEAAELYLVSLFDDTNLCAIHASRVTIMPKDMQLVRKIRGETFLKPLSSQY

SEQ ID NO: 168497 - protein, 159 aa, Heterodera glycines
HSFCHFLWLNYTKALVTTHSLITQMLCFATSKCFPQSFDQYKSRSVSLIFIFLLTIHLLFAEIASEKSSKETFKDSLVQNSPKSDLNFLFQQRSTQKTAFIRHHYASSVANGQSGQHSRHRRRIPTGIIGKLIAKLSGKTGKIAATASKSDDIFVGTAK

SEQ ID NO: 168498 - protein, 65 aa, Heterodera glycines
NLLLFAPRIHYMRTQAKEQLTHQITSIFLLLSNPIALSIAGSTFFSSFQHFVLKFLHRAESNMSN

SEQ ID NO: 168499 - protein, 153 aa, Heterodera glycines; identical to SEQ ID NO: 163972

SEQ ID NO: 168500 - protein, 122 aa, Heterodera glycines
MKTALELAKKIVCGVFIAHVFRQKVGRILTGVGDSMLPTIHDGDILWARVWDPNDALRPGDVVCLVDPLDAEEYVIKRISAVHKDCIEVRGDNAKKSLDSRKYGPVPAGLVRYRVSLRLLPL

SEQ ID NO: 168501 - protein, 152 aa, Heterodera glycines
MPLVHNCIACTRHSLLIVLGLIMIMANCGQAMRQQAVAVRGQLRCGNRPASGVKVKLWDEDDGPDPDDVLDEAFTDSSGSFQMRGSTRELTNIDPVLKIYHDCDDGIMPGQRKVKLRIPSQYITNGGLARRTFEVGVLNLETVFAGEERDFI

SEQ ID NO: 168502 - protein, 234 aa, Heterodera glycines
LFSQIFNQMACSVRLDHHILLPSHFFPKFPPHGPPPPIPPPYGEPYIPRLARRAAGSLSTLSSCAVISAEKAHKTTKRKAMIKRRGDILRAISARVLKASCRIRHEGMANFLYIYSSLRILPQSVSSAFSIVHCQRNISIDNKCHQQNQAFAKGNNFQLPKQQKDAREREALERQLRAAPRGRFSLPNVDRVYNSDEVYEELCKPAKDRAKALFLLSIVVITVCFITDLEHSRK

SEQ ID NO: 168503 - protein, 263 aa, Heterodera glycines
  unsure (1)..(263): unsure at all Xaa locations
MSNLNFEDNLQRVQVEIQWKQCLYNPIVAPFADVGSYPIFTDEFKGTRKCTLDVYVQGNLEHLDDKVVFLTVHDVGKTYLSCVDLANSPTLSPLVGQRAVFLHVSVPGQAPGAENFVGDFPSMEQLGDGLSQVMEQFNLSKCIAXGESAGADIVCRFAMSFPQLVVGAVLVHCISTTHGIIASIKELFTNLLLNDGEMTHSAWNWLLVHKFGNHEMDKEKRNYVDAIKAGGMNEYNLSRYLYAFSHRDELTDRLKDQLGKVDV

SEQ ID NO: 168504 - protein, 136 aa, Heterodera glycines
MICPNESEPDTANGEQHKNSAAMNGHGFVPSGNAETEGKADKRHQQQRKLYKADENPPFLLTFLFGFQQVMVSLSVLVSIPFLISDEVCPGRDRDQLRVRLIAATFVTCGIGTILQTAFGMRLALLQGVAFAYIPS

SEQ ID NO: 168505 - protein, 121 aa, Heterodera glycines
KKEVPTNEILHCEGGQVDFSIDDSHIIKSEKGEGEKGDEELIPIGSPVCKKPRDAGHRCHGRAGGPIAAKNLKWYFDTETFLCLAFSYNGCGGNGNHFDSPADCWDKCKLGKAETNFLFID

SEQ ID NO: 168506 - protein, 74 aa, Heterodera glycines
IIKFYFFKNAPFFARRLCAPLSHQSVHFDGRRAKVSFVGLGEAGHTVSKRLRDINISKDQMLDVRKDVGEPVTD

SEQ ID NO: 168507 - protein, 103 aa, Heterodera glycines
LSSYFIETLFDLRVQHFFFYHKLFFLVFHRLSLLPFSIFHYLSHHFLQPQWPPPPWPQRRSRIIGDAMFGPPSTEFSTVPWVPAKIAKVIRKRATKKRRGDIL

SEQ ID NO: 168508 - protein, 190 aa, Heterodera glycines
MTKFVCVLLLLFAWTLQIVHPSVVPSDQIYIIEFNRDNSNNQQDNDLKSANGVEDSKMTNGVISQDSAQVVTTNGTTELETDPLTVSVELQRGGRAVGNQFNINFTDISYVLVCSARFRISLPSDTTLRSHSKMTAVPNTSDQFTLPDGVHLYPGLSHTAEVILSGNGQPEVTILDTLTVLTTEKCPNDV

SEQ ID NO: 168509 - protein, 133 aa, Heterodera glycines
RMFRPTELIFYTNNSTSNSSNTEEQLLTLIIFKEYIRKKQHQFWNGTTARKRKTTANEEATSNRTEDQRKERETKEQFIRTLDQHQQQQNEQQNGDKRLRLLTKQKHKHRQVQQQNNNNRRRSYCLLLRLIRQ

SEQ ID NO: 168510 - protein, 165 aa, Heterodera glycines
KTNTPPKLCALVPQSADRIPSGCTLAREYFYDGFHLVEIPFAEKSRSMEKRLLPPDGGVGTWQLANPDQVEAAKQFVKKLTNTKFSPDDFANPVLQQHYKAVEMVALDLPFDSEQFKKEAAENDKLIPYFKNPTFEQRVAKELEEFAGICETIAETREKGKRKSA

SEQ ID NO: 168511 - protein, 116 aa, Heterodera glycines; identical to SEQ ID NO: 163670

SEQ ID NO: 168512 - protein, 340 aa, Heterodera glycines
MLSSPHNFKVAIVGAGPSGLTAARQALLYGYKVRIFEKEQNFGGVWRLAISENAQRRPVPLQSVMDCSKQLCAFSELAVAEHFPTFLRPSDAVAYLESYVRTFELARHMKLGTEVKTIRRSDEQPNNGPSEGQRLVEELFDAVLICSGARLRRWRPPEYRMERAFKGTVIHSEQFTHSSDFRGQTVCVVGLGNSAVAISIALAHTAKQVFLCTRRGEWILPLLQSDGQKPWDWPFSSRWHFWGRRWVPKCLRNFCWEMSAQSVSPDCSQNNGIGRPMHRLLSANLTFGAEQLCPLLASGRIRIRPNILSLSDSNLVEFADRTVEQHVDALVICTGFEFDF

SEQ ID NO: 168513 - protein, 179 aa, Heterodera glycines; identical to SEQ ID NO: 162465

SEQ ID NO: 168514 - protein, 145 aa, Heterodera glycines
MQPQSKRKIQVSFLIRNGSVESKHRGFVNALQFDPTTRSLFSAGSDSVIRQWDTSAPSGSAAFLRSLEHHCDWVNDKRQIVTRDSDGNVELWDVMQCGRVNTFPMGTNMEEVIKDNVRKVWIPSWFGVDAKCGVLEITLDESDAF

SEQ ID NO: 168515 - protein, 232 aa, Heterodera glycines
  unsure (1)..(232): unsure at all Xaa locations
MSDRKDSVTGGKRIEQELAEDGRPVYIVVLTIFLKGFFFLYDLLVFIPFKLFADPELKKERSREQKAVPIDGNPASPWRHVDTIGTALYTELFEDCPTLGKIWDKAAELHRGHNCMGTRDILEVIQERQSDGKTFQKLALGKYSWMDYEHVDEVIVEVASGLDNLGIEQGQKVVIYAENRKGRDDLRHPLASNCALPIVPVNSTLGDEAIAFALXECDAVLAFTSRPLLSKV

SEQ ID NO: 168516 - protein, 629 aa, Heterodera glycines
MVNILTIRWTICTTLRNGAWPCARVLMLWQPYRLLLLKRMLVKMEMTTQQHPTTYWRGMAVFYWKQKAVSYRSNFYKKFKMPNQKDGVTGGKRIEQELAVFDLPFYIVALAFFLKAFFRLYDLLVFVPFKLFADPELEKERSRERKAMPIDGKPTSSWRHVDTIGTALYTELFEGCPTLGKIWDKAAQLHRGHNCMGTRDILNVVEEQQPDGKAFQKLALGKCNWMNYEHVDEVIVEVASGLSNLGIVQGQKVVIFSETRKEWMISAIACFKLGLPIVTVYPTLGDEAIAFALAECDAVLAFTSRPLLSKVFSSVKDCPQLKRVVYFSELHALAEVAEKAPDAIKEAFKSIGRELYSFNALKALGHSQAKLERNVQPDDLAMIMYPSGTPGKPKGGLLSHRNIIPTASGQSAVISVSTSDTIIGYLPLAHILEVCAEIICLSKGCRVGYSSPSTLHDRAVKIKRGTTGDCVELKPTLIACVPAVMDKIFKAVLDEVKEKSPIQREIFRICYERKRNRFEGGYKSLVMDSLAFAKISKMLGGNLRFVISGGAPLNPETQRFMNICFCCPVVQGYGLTETCGGATLADEHDLSTGSVGPPLRSCEIRLREWEEAGYLPTNSPPQGEVLIHG

SEQ ID NO: 168517 - protein, 152 aa, Heterodera glycines
MNLGRCSICTLSFDLNDVSALKCGHTYHYQCIDKWIANSKTCPNCRTSNLKRDILKLFFDEGEKSFSQLVQEPANAELLAQLKEAQDVKCFLEKTIKEQHERLTLLEFKLKQQKTKGNELNMQIQRKAQHIATLESQLFDQKVLKETNEKYK

SEQ ID NO: 168518 - protein, 69 aa, Heterodera glycines; identical to SEQ ID NO: 163354

SEQ ID NO: 168519 - protein, 78 aa, Heterodera glycines; identical to SEQ ID NO: 166794

SEQ ID NO: 168520 - protein, 136 aa, Heterodera glycines; identical to SEQ ID NO: 163377

SEQ ID NO: 168521 - protein, 123 aa, Heterodera glycines; identical to SEQ ID NO: 163277

SEQ ID NO: 168522 - protein, 191 aa, Heterodera glycines
ARQEAHQIRGRIRLLIGDRDLELAANPSPTTNEDVNYGFRFISENNLNADDNQQIPNIIAFGRENGEADDDQNENNSEEGREIEQTQNTTGEEEEEDNATDDNVGMSSTESDGQDKMKANNGKGTCKNEDESKPSPTVETEQNKVHQSASETVISQKANANNSEECKESNGENGTRISMKRQRRSHSVDSS

SEQ ID NO: 168523 - protein, 70 aa, Heterodera glycines; identical to SEQ ID NO: 163634

SEQ ID NO: 168524 - protein, 219 aa, Heterodera glycines
MSGFSEGTFHRNSTPNNTLATTAVPANYKMSMINDRNLFGNTLLSISPLHDDQSKSGRLVPLLMRHQKEAKSINQQQAFLGRSTSVRDRAAQLRKPIDLDEVAIDAAPFQLVIGTSLYRVHTLFALLGLNHAYVTNRGRLVGVVALRELRAALAHIYTRGALPTAQSMSRLRLNSLNFGLCSTDRSRANSGVEGNSDNLNGSSLRTAMSPTSLSGPLTQ

SEQ ID NO: 168525 - protein, 205 aa, Heterodera glycines
MADFEGRVKAYRFVAYTTVSFSIISLLSVCLTLPMLKSYVSNVGMKMDSELSSCQHNAKDIWSEVSQLKGLPLLVAGNRTARSAYGSCQECCSGGAQGQPGQPGQPGRPGNPGAPGSPGQPGQTPQTPCEQVHPPPCTPCPGGQPGNNGPPGPPGAPGSPGQPGTGGGQPQPGEPGPPGPNGQPGQPGQPGAPGQPGQPASPPQT

SEQ ID NO: 168526 - protein, 252 aa, Heterodera glycines
  unsure (1)..(252): unsure at all Xaa locations
MADFEGRVKAYRFVAYTTVSFSIISLLSVCLTLPMLKSYVSNVGMKMDSELSSCQHNAKDIWSEVSQLKGLPLLVSGNRTARSAYGSCQECCSGGAQGQPGQPGQPGRPGNPGAPGSPGQPGQTPQTPCEQVHPPPCTPCPGGQPGXMAPPGPPGAPGSPGQPGTGGGQPQPGEPGPPGPNGQPGQPGQPGAPGQPGQPASPPQTEPPPPGPPGEAGAPGQPGQPGAPGQPGASGQPGPKGPPGGPGQPGNG

SEQ ID NO: 168527 - protein, 291 aa, Heterodera glycines
  unsure (1)..(291): unsure at all Xaa locations
MADFEGRVKAYRFVAYTTVSFSIISLLSVCLTLPMLKSYVSNVGMKMDSELSSCQHNAKDIWSEVSQLKGMPLLVAGNRTARSAYGSCQECCSGGAQGQPGQPGQPGRPGNPGAPGSPGQPGQTPQTPCEQVHPPPCTPCPGGQPGNNGPPGPPGAPGAPGQPGHXGGQPQPGEPGPPGPNGQPGQPGQPGAPGQPGQPASPPPTEPAPAGPPGXAGAPGQPGQPGAPGQPGAAGQPGPKGPPGGPGQPGNGGAPGQPGQPGQPGNPGERGICPKYCAVDGGVFFEDGTRR

SEQ ID NO: 168528 - protein, 143 aa, Heterodera glycines
AAKRERRALFQRPRRRHGAGSRKNSAQITFPLNWSNGRHSVRRAKAWISADLHRDNQKQENILLSVLRNWAFLRRVLYYAVCAVAMGLDMIHTIKIFGRIHITETALNALNSACRVEVGSGPEHSRHLVEKGIKQTSLVVSEE

SEQ ID NO: 168529 - protein, 149 aa, Heterodera glycines
FFSVKCFISQPKNGETRAEVGCHNWSWSGKRLYWIFGSFPWRALCWIYSLKCRAVVAHWWRMFPAYYQSMLVVGRTNCSMKRKAKVAIGRNDSQHWHPSSSFVVWSFANPEVVSDFFHFDQSRGLTRSFLCFSINPCEKCAKAIGKLYI

SEQ ID NO: 168530 - protein, 40 aa, Heterodera glycines
MIKRVANPINQSNANDQSSSDRFFRRSIPFDQSQKSVFVR

SEQ ID NO: 168531 - protein, 206 aa, Heterodera glycines
MSAANDVAATANDPSTVVCEEKKSSAAEEELIDVVTVGENNPTGSAGTKTGESDEVFVVEQIKNKRSVNGTDEYLIKWKGYDDEQDDTWEPLENLHCPELLKEFETNYCPAKTKRRKKSSGKVAKKRKISSDSTLPTIPLVLKDRYHIGEDGAVPEHIIGVMKHEESGKMMALLTYTDDREATEFVPTEILLENKLTAKMILNFYQ

SEQ ID NO: 168532 - protein, 282 aa, Heterodera glycines
MGNEHSNRSKGHPSSSSSSKKDSPATRLQKALPSALKFGSNDLSSSALRRLLEQSKKSRSLQLKGAGIKRVPSGIVEEVHSLLRILELSSNKLRELPSTIGTFSMLKQLYIANNRLTNLPDEIGCLKTLELLDVSGNQLTELPDPLAACNSLTQMNASNNKFSTFPSVVTRLLRLEVIDLSENSITELPDEIAILRATELIIRRNQLALLNASNLTKCEHLKILRVEENCLPREAFTAELLEKSELTLITHEGNLFAEKEFQALPGYDAYEQRFTATRRRLF

SEQ ID NO: 168533 - protein, 193 aa, Heterodera glycines; identical to SEQ ID NO: 163190

SEQ ID NO: 168534 - protein, 85 aa, Heterodera glycines
RGSTIKYLRIPDEVVDLVKDEVKEVRRQQKDNQRMKKQFAKGTKGAGGPSAGGGRPQQGGRPGGGPSRGAYRGGAHPSGGQPRRN

SEQ ID NO: 168535 - protein, 284 aa, Heterodera glycines; identical to SEQ ID NO: 162492

SEQ ID NO: 168536 - protein, 158 aa, Heterodera glycines
KRKKMLFYDHHTRTCCFFNVQKCAFTFALIGFVLNLVALVPIFLPYSPTSQEKPSIYIGKCLHILFSAMLFLSIMLAYKLRKAWLYTPYLIYTGISLALAVFGCLTYLYFLITDPQSLLDDNWRKAHPGKATNDSEARAIASAWLALMLVYLLFSGWI

SEQ ID NO: 168537 - protein, 123 aa, Heterodera glycines
FDEDVHPIQFMRKTHWSPAKRRCIDAKFFESNNRGEWNFNGNHARRLLCGRGNFKLENMFKRFFSIAPQFHRAQSDCEALLQVCLSYGMDFVKFVDRNCSYFPDCFYTSSKKTQTLNSLNTDL

SEQ ID NO: 168538 - protein, 57 aa, Heterodera glycines; identical to SEQ ID NO: 162506

SEQ ID NO: 168539 - protein, 173 aa, Heterodera glycines; identical to SEQ ID NO: 126813

SEQ ID NO: 168540 - protein, 125 aa, Heterodera glycines; identical to SEQ ID NO: 163336

SEQ ID NO: 168541 - protein, 243 aa, Heterodera glycines
DEPWMPAEKVYTIKGRGTVITGKLEQGTLKKNDKVTIVGLGKKLDTTIAGLETFRKTVDQAEPGDQLGVLLKGLGPKDVRRGSVLLKQGQDAHFTDKVRAQIYLLKPEEGGSKMPLAHMFKEHMFSLTWDSAATVMLQGRDFVMPGETVELEFLFNTPQFVRPQQRFTLRHDKTTIACGVFLEALPESEGEIPDKKWRKMQMRGVMERVGFNPFGNRSFERACKPDYTNSPKDNPAEALFKSE

SEQ ID NO: 168542 - protein, 132 aa, Heterodera glycines
TFGEEVFGNFRLVALQLRDFVSSRSVQEKLGVVNSSLAPIRDAANATEQFILDEQRKVLPRAVAISMGGMAGFVAAMRKGGRMRRTFYPLIGLLTMTAFCYPNETVHSVRVGIAHSQSAWHNFKQAPEPKSS

SEQ ID NO: 168543 - protein, 171 aa, Heterodera glycines
MGSSASESPPPPKLVAIQDLPIYKAESVPAARAARPVDTIGRPATFGEEVFGNFRLVALQLRDFVSEKLGVVNSSLAPIRDAANATEQFILDEQRKVLPRAVAISMGGMAGFVAAMRKGGRMRRTFYPLIGLLTMTAFCYPNETVHSVRVGIAHSQSAWHNFKQAPEPKSS

SEQ ID NO: 168544 - protein, 207 aa, Heterodera glycines
  unsure (1)..(207): unsure at all Xaa locations
EQKTKEHAMQSKQQXPRELKAKETIIRKQFRQAVKIQTRQFKAYQSQMLQMAPREEHRELLNRLKEEQSRKIASLADQYEATIETMVTEQTIKLDAQQEEDLRQLTEKLNRELSMLTEYQEKQRVELSAQIERERVQLQDRVNLRLAVLKQKMNEEKVHFERNRERQLAQLHDRQAQALSAFSVDERRKKSSMGSDGGRNDASSTNL

SEQ ID NO: 168545 - protein, 161 aa, Heterodera glycines; identical to SEQ ID NO: 160985

SEQ ID NO: 168546 - protein, 60 aa, Heterodera glycines; identical to SEQ ID NO: 166781

SEQ ID NO: 168547 - protein, 137 aa, Heterodera glycines; identical to SEQ ID NO: 166780

SEQ ID NO: 168548 - protein, 145 aa, Heterodera glycines
PTAKSAVPTVGELFRAQLGHFYAQIGDIKFEDPPSSVNFYASICLLLVGHVLQGHRPTLLRRVGPAWLGRVREQLADWRAMDEADKAAQQQKQSHKNPQKRDEHVDDDDGMSAELRRRMAQSVEQQQLFRMNMFTFQLDEAERRV

SEQ ID NO: 168549 - protein, 128 aa, Heterodera glycines
MVVEMSSGAATTASAAAVAGTAPSAGPVPSCICSSTSQLLTAAGMDGIPPAKTPANSGPDANFLADSLGVSPLYRQEDTKRWQTAAKVYQSSRSQMHSPTSGTCAPQHFHFGESLTAEGHLTQKIRQC

SEQ ID NO: 168550 - protein, 417 aa, Heterodera glycines
MDDLCRRGLLTTEQTPHEPSSADKFDGADEAVLALVDKYRRTCGLPTAKRSAPSPLNSLLSPGKLPPAGKPPTPYIPTPGGSAGYAPAALLKQQQRNASFGYHSNSSSSNQDDWQALLQPPPPPPPPMPSLSSVQTALSGGTPRGILSHASSAAAAAHKRDTLRSPGTEARRPKNQTLFKNALEQIRKINEESKSGSGTVPSATSVSDPFPSSSIPPLKTPSPLRPLISTISATSTEQQHLPAPPVPPNLPRDPRLLKHGNATAAAVVVVVDKPNQQQQVRCATIPVDARPNSVLSPPCDPRLKRISAEALPVSSPSVLPPLPKFKATVPVLNVRPVSSAAAVVVPPPPPSPPPNVSVFKQLVPSAASVSTTAPAPPNLGFKRAYGLVGMVSSGIDIPPPPPPPELAPPEEKKMMLQ

SEQ ID NO: 168551 - protein, 157 aa, Heterodera glycines
DNHRKLIRVTAPPPQRQQQQLINGVVMSHNQHLHVPNTAIGGRTTTVDMAIPQRQQLSDSEVLPVHHHCLYRIDHPQILSSGTATDFSVLQNFPAAKPRNAVNLNNNNMQQFVPTTESFSSPSSSSAPNTAIELTLMNGELSMDSSATISQFHPIVL

SEQ ID NO: 168552 - protein, 117 aa, Heterodera glycines
YGTVRWIKLEQCVEGAGTRLSKPYISLLSIYPLLQLKHCFRRGVVLLESGANSFIRLCDLLVDEWTHSGQLGEDMANLVKDIIYAPKLHLNQGKLRKVNESNGKLKQMEGEERVWKT

SEQ ID NO: 168553 - protein, 301 aa, Heterodera glycines
  unsure (1)..(301): unsure at all Xaa locations
PPGPSTETPGPPGPSTETPGPPGPSTETPGPPGPSTETPGPPXPSTETPGPPGPSTETPGPPGPSTVFPGPPGPSTETPGPSGPSTETPGPSGPSTETPGPPGPSTETPGPPGPSTETPGPPGPSTETPGPPGPSTETPGPPGPSTETPGPPGPSTETPGPPGPSTAGTSSTKTYTVPTTPKPPPCCYGCDYPVDCHTSGKDCDYSPLQPPYQSDPYPVGKCVFKNVTCAAPNTGKVLFMKLNNDPNSVVSSSVSPFNKVTVILQCTCKPYFAPYWVQVGVDGNPAKQVNVKSATCGRHCY

SEQ ID NO: 168554 - protein, 229 aa, Heterodera glycines
MASTITHVVFDLDGVLIDTERHYTTANERTLEKFGAKFTREMKLKMMGRKKTEAVTVLLKDAGIADRVTMDQYIAEYDKHVLQIMRALTEELPGATKLIDHLYAHNIPMAICTGSDNEEFASKMLKFDEWLKKIPLRVLCGSDPEVRIGKPNPDAYEVTIGRFAAKPTSPKNVLVFEDSINGVESALGAGCTVVMVPQREFLPNDWPEKELRSRPNFAALLDSLDNFCP

SEQ ID NO: 168555 - protein, 117 aa, Heterodera glycines
KSLADNQSIFPLLICRRWWRPRISSKHHSSPCANGRRPCPTFSREVFQPFRHSTVQKSDWQTKREWIPWHMSLSPSSVGSAPLPSPTKRIRHIFHRVLLVRHHFLLQQKRIRHIFLR

SEQ ID NO: 168556 - protein, 167 aa, Heterodera glycines; identical to SEQ ID NO: 163158

SEQ ID NO: 168557 - protein, 135 aa, Heterodera glycines; identical to SEQ ID NO: 166777

SEQ ID NO: 168558 - protein, 206 aa, Heterodera glycines
EKYPARNNLEHLAMLTCTEEPHIVRKTGIICTIGPVCRSVEMLVQMIENGMDVARMNFSHGDHEYHGGTIKNVREAAAKCTKKRNVAIALDTKGPEIRTGLLAGGGSAEILLEKDASIRLTTDSAFEKSGTAINLYVDYKNITKVVTKGSRVYIDDGLLSLIVEEIFDDAILCKVENGGKLGSRKGVNLPGTPVDLPAVSEKDIKD

SEQ ID NO: 168559 - protein, 519 aa, Heterodera glycines
  unsure (1)..(519): unsure at all Xaa locations
FRQEQIMEKYPARNNLEHLAMLKCTEKPHIVRKTGIICTIGPVCRSVDMLVQMIENGMNVARMNFSHGDHEYHGGTIKNVREAAAKCTKKYNVAIALDTKGPEIRTGLLAGGGSAEILLAKDASIRLTTDPAFEKSGTAVNLYVDYKNITKVVTKGSRVYIDDGLLSLIVEEILGDDAAILCKVENGGKLGSRKGVNLPGISVDLPAVSEKDIKDLRFGVEQGVDIIFASFIRNANGIRTIREVLGEAGKNIKIIAKIENQEGEDNVDEIIAASDGVMVARGDLGIEIPAQKVFLAQKMMIAKCNMAGKPVITATHMLESMVNKPRPTRAEVNDVANAVLDSSDCVMLSGESTKGDYPGGSLKTMQXICLEAETAFFHSRYFEELLQNTPSPTGPGETIASAAANAARRCRASAIIVLTTTGKSAQECSRFRVPIPVLAITRYEQVARQLQLCRGLFPLYYPHMERDTEWTEDVNKRIAYGIGVGKERGFIHNGDFVVIVTGWQAGAGSTNTIRLQKVE

SEQ ID NO: 168560 - protein, 303 aa, Heterodera glycines
  unsure (1)..(303): unsure at all Xaa locations
MNIVCPSHPEADLVEDARAGDLICTRCGLVVGERLIDVGTEWRSFSNESSGKDPSRVGAPENPLLSGSDLSTSIAVSFGSDSDRALANAQRKLLSSTDRQMTQAMMVIREMSEKINLTRTIQDRAAKLYKEVLESKALRGKNNEAQAAACLYIACRQEGVPRTFKEICAVSKVSKKEIGRCFKLIQKTMETNLDHITSADFMSRFCGNLSLPYPVQVAATRIAKKSVEHDLVAGRSPISIAAAAIYMASQASNDKRTAKEIGEIAGAAEVTVRQTYRLLLPKXLELFPPDFRFETPIDQLPTS

SEQ ID NO: 168561 - protein, 90 aa, Heterodera glycines
SINWSVPLTMLFSTPMPLFLVSSVFLFVFLLVAMFLANPSDARPQFGSFADSMTSGTILSNMWGKKAMRSGQQQTEKERKLKKTEENNWK

SEQ ID NO: 168562 - protein, 387 aa, Heterodera glycines
MALVSKWRSDPFGRSDWPSLWRDRFSRDWDDWPRDWPRPGELMERFRSRDFDRDRWWRDWPTDWPRMDAIVPRFSSHLDRFDRNWRDDPFWRDLYPRWAEPIFKDGIDVKTNITNDSNRFAVEMDTYQFRPEELQVKTMDDTLLIEGRHEDVRDRDNYTKMYFVRKYQLPADVESHSISSHIDSSGRLSVEAQKRWQAVEGERSIPIESGSRRQGGGYGSRSSSYSPRDRYYADSGRGSANDYYRAESRLNGAANGGGGYLSPNPRSDGYRTEFEKRETDANGMRHEARREEFREEFRRSGSAANVLPPASPMLRTESRLSGAVGANASSGEERRESSHFRRTASAASREYRSGGAFAGGENLLRPAEELGGRSSAFGTRNVPIHRG

SEQ ID NO: 168563 - protein, 148 aa, Heterodera glycines; identical to SEQ ID NO: 163353

SEQ ID NO: 168564 - protein, 160 aa, Heterodera glycines
PRAEFGTRLGFAAAFDDHFQHFPWLFSALFAWLLLLFLLLELFPSFSANLSLQLVSPRRALIALFRAPNPTEHYLAFLDIFRIGAICWVISNHLGSEGRLDVLLGLPHGEHFKQSVHSLPIFGPIFGNSALGVEVFLVLSGFLAARSWHRRWQSDLGFWP

SEQ ID NO: 168565 - protein, 265 aa, Heterodera glycines; identical to SEQ ID NO: 163907

SEQ ID NO: 168566 - protein, 254 aa, Heterodera glycines
  unsure (1)..(254): unsure at all Xaa locations
MSVFLNSVRRLSVISSAMKFLRQQEAIDIDRELFTSCGFSVDQLMELAGLACAQAIGETFEKGNVLILSGPGNNGGDGLVCARHLKHFGFSPSILCPKPSQNDLMQRLMLQLECLGIPFVESFPDPNSIEKFNFLVDAIFGFSFRPPIRXEPFNKILKQMESVQNRVPIVSIDIPSGQPKGWDVEKGPPDEKSGLPILSPLALISLTAPKQCAQFFKGEYHFLGGRFVPPALVQKFGLENMPPYEGSXQFMRLN

SEQ ID NO: 168567 - protein, 278 aa, Heterodera glycines
MHGSSPLTEANLCMKFESSFSWKDWVRLRDTWNAVVTSQSQIHRHSEQLDKIVSEESSYRNYASDIQNRQIMIQIVERNVNKARELVRTARYQLNAFNSALSQMSAMFKSQEENDSQTEHGILELNNQNAEMRLELSRLRNELVFRRRHMLKSLYEVFFLPKLKRSSIAAPLVFRRQCFCSNFDAIRSLHFPSVPARLGHNDAELSSAAGFIVQLLLAISHILDIPLKHLLLFNGSRSAIFSRSSLERFGPLFHFLCKESKESAGPNDVPAQRRHRPT

SEQ ID NO: 168568 - protein, 97 aa, Heterodera glycines; identical to SEQ ID NO: 166771
  unsure (1)..(97): unsure at all Xaa locations

SEQ ID NO: 168569 - protein, 140 aa, Heterodera glycines; identical to SEQ ID NO: 163716

SEQ ID NO: 168570 - protein, 167 aa, Heterodera glycines
MPTFAELFELSATDVVLVVLFVYVVYKLFFARRHIPPPPDVPQVEPLEKQDMTVEQLRRYDGVQDEHICMAICGKIYDVTKGRDYYGPEGAYGALAGHDATRALGTMDVKQIKDEFDDHAGIDPSDLEEAKEWQQRLSLKYPFVGRLLAPGEQHTEYETVADNREGN

SEQ ID NO: 168571 - protein, 196 aa, Heterodera glycines; identical to SEQ ID NO: 163621

SEQ ID NO: 168572 - protein, 278 aa, Heterodera glycines; identical to SEQ ID NO: 163271

SEQ ID NO: 168573 - protein, 178 aa, Heterodera glycines; identical to SEQ ID NO: 162986

SEQ ID NO: 168574 - protein, 157 aa, Heterodera glycines
FHRQSAGHIGTPCDVLTIVRVQCQLENVFGIASVVVLAKLVHKRKSPWNAPKFVDIRHNFGPFFFRLSLLLLSFPVAFLVTAAADRLRRNVQIGGAQNDGTDVDALKTLLQCFGQPPFLLLLFFVFRRFFVITFLGNPFSWRSQHFPRKFWHFITKT

SEQ ID NO: 168575 - protein, 187 aa, Heterodera glycines; identical to SEQ ID NO: 163235

SEQ ID NO: 168576 - protein, 159 aa, Heterodera glycines
ELKSPDIKPPEELLQVFSNPSRRSIRLADEARQCAYQNEMSRLARIIQSQQWTISSQQRTIESQQRTIEMLVSRLPRNDGAAAPPNGDERRDMGGAPNEQQHGQPPILQIDNRPHIAPEPNGRGGQNGGGHGQRPNGNANIVRGQNVVPVAPPPFVAQR

SEQ ID NO: 168577 - protein, 149 aa, Heterodera glycines; identical to SEQ ID NO: 162412

SEQ ID NO: 168578 - protein, 177 aa, Heterodera glycines
SCRIRHEALIYRMYIRELESPGELPLVWLNALSRSCFRPTKDDQLVSLVELRQAAERIAVENAQLNRVNAMLLILIQRPAGVLPHQAVPVAGAFGQQQNQQPANAFPIPPVVPVVPVNANNRLHTDELQLEISRHARTLNELSVEYARLMHTNRTLVEQLFAGGAPPYVHQQFEPVD

SEQ ID NO: 168579 - protein, 202 aa, Heterodera glycines
DNGKKLSGLVELGYRKRVLQRLGYATEEDTITEKGRVACELSSADELLLTEMIFTGAFTDLSPADAAALLSCFVFQERAPIGKLSDSLSEHLRTMQGMAKKIAKISIECKLELDEEKYVESFCPAMMTVVSKWCSGATFAEILETSDIFEGSIIRCMRRLEELLQEMVNAARSMGDRPLEQKFEQARSLLKRDIVFSASLYL

SEQ ID NO: 168580 - protein, 109 aa, Heterodera glycines; identical to SEQ ID NO: 166767

SEQ ID NO: 168581 - protein, 139 aa, Heterodera glycines
MSYNYLFKIVVVGDHNCGKSCILLRFSENSFRSDHVSTLGVDFKLKTIKIGRDKIRLELWYFNVLTLRMERYRTIYNSYYHSAHGVMCVYDLTNEKSFQNLENYWLRQVKEHAPQNAVLLMVGNKADLDSERKVDFDRA

SEQ ID NO: 168582 - protein, 111 aa, Heterodera glycines; identical to SEQ ID NO: 138785

SEQ ID NO: 168583 - protein, 239 aa, Heterodera glycines
GLSEYSLFIIMQIFVKTLTGKTITLEVEASDTIENVKAKIQDKEGIPPDQQRLIFAGKQLEDGRTLADYNIQKESTLHLVLRLRGGMQIFVKTLTGKTITLEVEASDTIENVKAKIQDKEGIPPDQQRLIFAGKQLEDGRTLADYNIQKESTLHLALRPRGGMQIFVKTLTGKTITLEVEASDTIENVKAKIQDKEGIPPDQQRLIFAGKQLEDGRTLADYNIQKESTLHLVLRLRGGK

SEQ ID NO: 168584 - protein, 247 aa, Heterodera glycines
IEMPIFFARPLAAEKKLPILNKTPEPTESQKDTLSDDGQDNQDSGASTSSQTNLIKNVRILRKEAAETSLEPYIQFQCFAHFAISRKCVNELCADVSSDGVDVHIFFEDDFPRLPRIGFSCLSLQELYEDRALLSEKNATPDQLSFIQLVRFVDNGLNEIPNWLLVAPKRGQIFTISLDLADGNGVRVRFSFGSVSPTPWYSVRYPPYKSDFSLVIEVDKKAVLRRSYEESSTLSILSSFGLLERKL

SEQ ID NO: 168585 - protein, 111 aa, Heterodera glycines
MRTSLLIPFSLFSLITLLFIVSFSEADIEVDSLMPRTKRQCCGGCGYSGGYGGYGNDGGGQCCDACGQCGSGGYGSGAIIITTGGGGYGYGGYGDGYCYSCGGGGCYGCCG

SEQ ID NO: 168586 - protein, 292 aa, Heterodera glycines
  unsure (1)..(292): unsure at all Xaa locations
CLPTPGSKNIAILPRRDSDLEAFSHNPSDGSFAPLVYRPSTXTKCLNLRFLSYXQDYYHSNRSLXGKTNLSHDGLNPAHVPYWWVNNPTLGEFCFAMIGRADIEGSKSDVAMDAWPPQASYPCGNFSDTSCWKLYTFKRIDXATLSRSVFVLKIRIKXAFAFLLYERFPSSLSXALGHLRYALTDVPPQSNSPPDTVIGAGSPGHRVARLNTKMDTLSGALPFYRLSKESMKXSGISLAPCGSHLCYTSHDSSQSQTRVKLNRVFFPXAKFAKPVPLAVVSLDSRXGQWESR

SEQ ID NO: 168587 - protein, 194 aa, Heterodera glycines
MTTPNLPYGAREGSGQFSTGTNFSPPPPPYDAGASSPFEQPHQQHQSPSPYGMMYSGGNVPSPPPPSSPYHQYQQQAPPQMSPPFQAPIGDPQQQFMYDPLLNTARHLGGQFAEQQKQKFTQYLSSTSFNLKYYFAVDTNYVRRKLGIILFPLFHRDWANKCEGDAPVLPCQDVNAPDLYISMMEYIAYVLVTG

SEQ ID NO: 168588 - protein, 86 aa, Heterodera glycines
SVGHSFVINQITTQNLSHCFASLPPLAHLRHQLKSPPPPGCKIVPLEKPSVKLNWRFSRGDKAAKDKNGRRRSRNRKRKKRRMGEG

SEQ ID NO: 168589 - protein, 103 aa, Heterodera glycines
LHTTRLPRTPSRLCTAFRFPFAWLCQGESALCGPSWPHRTAAELAVHACRVSFVLMSVISQPIAVISVSHGQAKASRLAESIVTTQLLATTPSFAFPIVDAPH

SEQ ID NO: 168590 - protein, 69 aa, Heterodera glycines; identical to SEQ ID NO: 162394

SEQ ID NO: 168591 - protein, 151 aa, Heterodera glycines; identical to SEQ ID NO: 164438

SEQ ID NO: 168592 - protein, 186 aa, Heterodera glycines
FFSDRQFIHKEKTREYADRLQEKQNTKFSKTNTKFSMVYRIVTLFSNGGGAVVQMEFVTTFLFVADETDHHNDNEQNGGDGQKNEHQTKGIFAIVQLATIFRSRTVRFVVAGFEGFVSEKRSRLIVRWRMERIGHAVDVGDTVRLVRLKLLRIAVQLLTIHNLCRANETKMDEQKDEEEKTERIHW

SEQ ID NO: 168593 - protein, 157 aa, Heterodera glycines
MLNATRSAVRAVAQRMPLARTMASAAPAGAVAAGQIKSVIGAVVDVQFDGPLPPILNALEVQDHNIRLVLEVAQHLGENTVRTIAMDGTEGLVRGQKVLDTGAPIMIPVGRECLGRIMNVIGEPIDERGPINAKNKLPIHADPPEFVDMTTTPEILE

SEQ ID NO: 168594 - protein, 213 aa, Heterodera glycines
MDSKSNDFEARRTVWDSKVPVEFTLDNSESVLASHQSCFMMLSRVSYFPVYLDKALKVLTSGDASEEQLLNVWLQFDGQILRWHYPIGVLYDIYHGNAGDGQTTPWPITVHLKNFPDELIRCRTKETLKFCFLQSLKEACQLKLRSNIAASMTKDEHGRLFDGLCNDRFNDFWMVNDKLMGLRSSSGEEQFSTIPARFYESSYSFRQLLLHSK

SEQ ID NO: 168595 - protein, 102 aa, Heterodera glycines
CRTVLEECYQSVRTKCRQRDKWTKDKAQKGIGREAELDLPKVGLRAQVTCPRQSDRTPKKSLKMSLRPLKKRAFRGWAVSVGRRDKRQTNDSNGPAFVFLLK

SEQ ID NO: 168596 - protein, 324 aa, Heterodera glycines
MSVEESPLLREFKTFLQATLVAFGSDGAPFSLVNQRFSEDWVGSPSLKEYATKLGYVHPNGIFKLLQSIPDQVTMMVNPTGEVILKPVPMEETRDNLEKIDATNKELKAERKRRQQYQQGPLPASVIAQLAAGICWPPPVPAQPLSSVFNASIERTAPLATSSIATISRPPPPPPMTKKFNPNLIPLGTPRFARCASTSNIAADSSADSGPSASGGPTPSPMVFHPPHQQPQQQPQRSKVFFGQRKKPPPPVAVPRNDFGDLAPPVAVSRNDFGDLAPPVAVPRNDFCDMPPPAAVSRNDVAQTLSSVFKRNEGYYEEDFHALA

SEQ ID NO: 168597 - protein, 148 aa, Heterodera glycines
MSYGDYQQRPRGCFNCGSADHQARDCDQGVKCYNCGGTGHTSRDCSEPRKAKTCNNCNQEGHIARDCPDAPAQSARSCYKCGEVGHISRDCTQGRFAGGDRMAGRNCYKCGEAGHISRECPQNAGGDSSWGGNSGGSSRACYKCGPEG

SEQ ID NO: 168598 - protein, 315 aa, Heterodera glycines
MTFPRNSLLRSPRIRPNLLNFSACFSSPSDGSAPRLEGSSPPPLASSIRFPHFVSRQKFTLSSTYEKQDWFPKHMVVQLKVMEGKLRTVDLVIEVHDARVALTGRNPSFGAKLYSVRPHILVFNKMDLINMKRYKEPIEEYYRNEQNITNICWTNCKNLTNKTQFQNLMDKMLDLLRNEHRFNRTVKTEYQVMVVGIPNTGKSSLINALRNVNLDFGKAVKEGARPGVTIRVQNRVRILDRPPTYLMDTPGVLNPWANNIDAAMKLAICNLVLDTTTRPNFVADYLLYFMNKYRDFSYVDFLRIREPSDDIKQVL

SEQ ID NO: 168599 - protein, 190 aa, Heterodera glycines
  unsure (1)..(190): unsure at all Xaa locations
MDPPDLSETQPTIPKRGHHHRRRVDISASRLPRAVLVRIFGHLSVAELGAVSLVCCSWKFIVDSNDFDLWARHARAQLPESALSDPYLFVNISSHREMLRAFKHAWNPSDCSRNAFVRTNGFTVHRQPIAQSTDGIRGKVGVSSGAHCWEFCWEGPLGTTAXVGVATKHAALHCPGYLPVIGSDDPSWGW

SEQ ID NO: 168600 - protein, 245 aa, Heterodera glycines; identical to SEQ ID NO: 163131

SEQ ID NO: 168601 - protein, 239 aa, Heterodera glycines
MAPKCLPLELLFEIVPFIPAEKAVPNALSSCRLLHKLLLPRVIKWKEQLLTDLMSFSAIVNNLSAKVDNLSGVVNNHSVKLDNLSGVVNNLSGVVNNLSAKVETIEKKMGETTGKAPNEQKERGNGHKAVMGAYNENNGTIEVPLHGYNVGKAIVERILNTENGTVHLHGMREPMSLAKAVEIGFFDNLSLTVVDPNTFSKAVFGRSIGTESAGLKWPIAAPAPATDIGRSESAKTCAS

SEQ ID NO: 168602 - protein, 84 aa, Heterodera glycines; identical to SEQ ID NO: 163611

SEQ ID NO: 168603 - protein, 161 aa, Heterodera glycines
MSQREEPRPQIKAKLKNSLIAFHLFLLVSGVVLFSFALWLQFDPAREFLLRLVHFSESTPFFEIAVYLMLGTSLFIFIAVGIGFSGIWKLERCLLSGFSVLLLLLIHCKLLILFLLVAYRFKFPDDTVMTEYLCKMAQHHYHRDKWATPLMDSVQFYHKCC

SEQ ID NO: 168604 - protein, 160 aa, Heterodera glycines
SQKCSQSRTLSAFEIVPVRGCKLSKSSSRRPEFCECCPIPRSGHRVFADSDFIYVFGGYNPFHSPDSTYTDFWRFNRLTHLWQKCGLSSSDPTTQLPNSLASFALASSSRPSECFIFGGTGIPFGLAASNELHRIRIDLLGNVNVRTEPKQSYEQRQNTA

SEQ ID NO: 168605 - protein, 118 aa, Heterodera glycines; identical to SEQ ID NO: 166759

SEQ ID NO: 168606 - protein, 96 aa, Heterodera glycines; identical to SEQ ID NO: 162347
  unsure (1)..(96): unsure at all Xaa locations

SEQ ID NO: 168607 - protein, 160 aa, Heterodera glycines
MRQASFYAVARGRAVGVFNTWQKCNDSINGFSGAKFKKFPTLEQANDFIGKHRETLNSGGKVISKKGPPVRTMIVKSAATTFAERRLTRNTAMFGVEASNSLAASNLVSVDDGFTTVVYTDGACSRNGFVGAKAGFGVFWSDGHPDNVSAPVNGPATNNR

SEQ ID NO: 168608 - protein, 38 aa, Heterodera glycines
MRIERARFDEVLVSQKKSKHLKIYKKFKNENSCEIFWK

SEQ ID NO: 168609 - protein, 223 aa, Heterodera glycines
TMAVSHPQQKQNGRHSGGGTVPKHIGIGRLPTEDNGTTSGENPSHQLDDGDDVHQFQLPLAFRSSLVHPSTTTAQNVHHHQLLQQPQLNIIVPSMECVSVIHPKREQQFSASVDQFLDGEDDLFKTEPLDLSLSSARTKANENGTMVGNGATVAGGIQRRKRTTNKRQMVEEMCETAATGRKVTPTEAEKRTSPPSAVGISLPPSVVPPSGTLFTPLASPSAV

SEQ ID NO: 168610 - protein, 207 aa, Heterodera glycines; identical to SEQ ID NO: 163608
  unsure (1)..(207): unsure at all Xaa locations

SEQ ID NO: 168611 - protein, 229 aa, Heterodera glycines; identical to SEQ ID NO: 162813

SEQ ID NO: 168612 - protein, 50 aa, Heterodera glycines
FVHSFVFLCRKVCVHCKCDRNEHEPSSNQALSVYERLGLKPSSDMAKVLQ

SEQ ID NO: 168613 - protein, 164 aa, Heterodera glycines
MMWMFFHTQIKDTVLFKWWKVETVGSLLITCLVMYFGAICFEAIKWLRLMLEQKSRQPNSANSAGLNMTDQNKTVPMTNRRYAESLLSRVHLLQSVLFTVQLLLSYLLMLCFMTFSVWIGMAICAGAATGFWLFGRRVPMLAFASSGAAGSGQGYASTGRTELH

SEQ ID NO: 168614 - protein, 163 aa, Heterodera glycines
VRYLAIFAKMNNAMDSVPARIVIIGTSKMRLSERFNKLQKAPPPPLPQAQQQKVFLKREGINGVAIGPVISRPRVIDERDRPDNRIQSSKSFLHDDYMDNDLYGDFVEPFLRRPQMGGFRSANLYEGFQPAPDPLKLTLDAYDQYSRFRPSHRRSIHSRITET

SEQ ID NO: 168615 - protein, 143 aa, Heterodera glycines
MMNLFKFRDIVLLRTIAFPPNFVLNRGINYRENSTIGSKQSIGNADEFKLREFGQKYLGKREVKFTEKLEFRSSANEVPMPIYQCINSRGEFVDGSEECPLPKEIAVKIYKEMVKLNTMDKILYESQRQGRISFYMTNFGEEA

SEQ ID NO: 168616 - protein, 154 aa, Heterodera glycines; identical to SEQ ID NO: 163605

SEQ ID NO: 168617 - protein, 150 aa, Heterodera glycines
MDHLIALIDGACLRMQSSALHWVSDSIKSKSEPKKPEKFKTQLCHHYSQNGFCRFGSSCWFAHGENELRSVSAGSSFSSPIGSRKPRSLLPRPPPPLMFGSSCWFAHGENELRSVSAGSSFSSPIGSRKPRSLLPRPPPSLLFNIFPKNP

SEQ ID NO: 168618 - protein, 61 aa, Heterodera glycines; identical to SEQ ID NO: 162315

SEQ ID NO: 168619 - protein, 101 aa, Heterodera glycines; identical to SEQ ID NO: 163512

SEQ ID NO: 168620 - protein, 142 aa, Heterodera glycines
  unsure (1)..(142): unsure at all Xaa locations
RRRSSSSSSSGSSSSTGSSSSGSSSSSSTTASRSPSPKKQRAAARPSARDDRTTRRSPRRSRSPHRXPTENREKHCQLSPRHERAAPSPPPVKRERTPEPPPRRLCVRNLSRNITKAHMEEIFALFGALKSCELPMDRVHVH

SEQ ID NO: 168621 - protein, 340 aa, Heterodera glycines
  unsure (1)..(340): unsure at all Xaa locations
MPSEYGIETDSVTLQRFVLNEQKKFPDATGDLTTLLTSLLTAVKAISSAVRKAGLAQLYGVAGNVNVQGEDVKKLDVLSNELMINMLKSSYTVSTLVSEENEQVIEVEVSGTQGKYIVTFDPLDGSSNIDCLVSIGTIFGIFRKASNTSTKEEDTLQTGRKMVAXAGYALYGSATMVVLSTPGRVDGFTLDPSIGEFILTNPAMRVPKKGKIYSINEGYAKKWSKGITEYIRSRKFPEEGKSAYGQRYVGSMVADVHRTLLYGGIFMYPATTDAPNGKLRLLYECNPMAFVMENAGGKAHSGKCPILDIQPKSIHQRAPIFLGSKEDVEELLEYIRKHDQ

SEQ ID NO: 168622 - protein, 167 aa, Heterodera glycines
PIKVMQCQKDCEEARRQRDREVNKKRTIQQFEEEERRARAIASAAFADPVPLTADERGHAELMKRISPMPMRRIMVSATQNQQKTEAAARVVAAYDRTAMAAPAPQFVQQPRGRTFPTALSVFGECVPNNCRRVGAMPSKNIVGVRLTQQTNSVANASQLKRTFPGK

SEQ ID NO: 168623 - protein, 202 aa, Heterodera glycines
MLSRLFLQPNNLPSIRYLATSAFSKARYGFRPSGGAGQYAFRFKEAFAARQVAPTLRERLLGPTTGKPFIVGTYALAGASVFGIGMLCYYGLTTTVDSAAVRSNLWPDYVRQRLQSTYAYLAGSLALTAGAGVAAARSPGILALTSAPSLLVWFGSLAAIIGSGIVVQKIDYHGNSAAKHLAWLAHCGILGAVLAPLCFVGG

SEQ ID NO: 168624 - protein, 212 aa, Heterodera glycines
MSSFFMHHQQKRSHQQAAAVTLADIRWMEPMAATESAATSSTPAKRLLTRLGTTRVGRYVQQLAIDYAASFRDIVVGMRQRPLRAVACGAALASLVFTLKSNPDEIALRARLAQLRQQMVLIPASIHSTRADERLEQYTVLLNGNRLELVDFLLFSVLVERPFDKKNDFYAAHDKTLRGWPWTELWRNAWDIGALGRFWALERSFDNCDVRH

SEQ ID NO: 168625 - protein, 186 aa, Heterodera glycines
  unsure (1)..(186): unsure at all Xaa locations
AYFINFDVKLAMSFQWPWHFDFPPFFTIQPNLSTRDKQLKAWGRLLLDYCQANRIYTTDLDEISKSDLFNNRRLNRHLDLSGIRAVFDFLELQKHVEWKDKDKTRCNIYWRRPXEWGQLLYEWANSIGLLNTVVTLYELTQGEYVAKESFYGLDKDVLLKGLQHLENQGKAVLIDIDGEKGGVKFL

SEQ ID NO: 168626 - protein, 145 aa, Heterodera glycines; identical to SEQ ID NO: 162442

SEQ ID NO: 168627 - protein, 303 aa, Heterodera glycines; identical to SEQ ID NO: 162409
  unsure (1)..(303): unsure at all Xaa locations

SEQ ID NO: 168628 - protein, 104 aa, Heterodera glycines
MNSATMFTLLLIIGTVLALTIGMPAPGGSDESVSSMRQKRGYGMSNGGGMGNGFGGGMGNGFGGGMGNGFGGGMGNGFGGGMGNGFGGGMGGGSGGGYGYGKRR

SEQ ID NO: 168629 - protein, 127 aa, Heterodera glycines
MAEETSKTSENIAEDNGIKALDSLFAAVAHASKCLASAAGTPNFCLATPAFLAFMVWCCFLMPPVAVLFRSYRRDGNAFTVQAAYNVILCFFLWVPGMLHALWFCFGETVRMFRRRVPPSDDAQKNE

SEQ ID NO: 168630 - protein, 152 aa, Heterodera glycines
MSAIHQFLEWSALSAELTFKFENLRRLLYLFVDSLFGLIILTFATSQWTNISTNFWAAIHLYIEQLETLITWLTNNPAGLKLNDALNTFLANFFFYHIHLWKTYVTVFEHSLTNWLLIVAFGALGFSVLVAFLSDFLRVLTVHIFCFHIYTH

SEQ ID NO: 168631 - protein, 322 aa, Heterodera glycines
  unsure (1)..(322): unsure at all Xaa locations
MNLLHKEWYTEFSPDDAQRIAGTGDGCSKMMKLDGAELSGAWTGQAFSLNVDKILFSERSKFQDVLVFKSKTFGNVLVLDXAIQTTDRDEFAYQEMLAHLPMCSHPDPKQVLIIGGGDGGILREVLKHPSVERVVMCEIDEMVVQVAKKFLHGLATSFDSPKLQLHIGDGFEFLKGHEAEFDVIITDSSDPIGPAESLFGKSYYQLVRNALKEDGVLASQAESIWLHLPLISKLMNCARDLFPSVAYASATVPTYPSGTIGYLLASKRQMHVLSVPLRPLNDSECQSMGLKFYNRLLHSASFVLPNFAEEALNQQQNSGRDQ

SEQ ID NO: 168632 - protein, 112 aa, Heterodera glycines
MIRRNFWEKSVNWRKNRNSCRRKTSIRHAFVISIRQLRLAIEIGDPVLISRCFLYISLAFAQKGQFLTALKIVRQEWIRGIELKSAFLLNCTRGVWSTIKWLMMNRKVMMLK

SEQ ID NO: 168633 - protein, 206 aa, Heterodera glycines
MHLSVCSLLLKRLPSTRLATTLANVRAKNVKQPSTERINAISLDDFPIAYPDFLRSEVLDRRDPLFEQLVQADMFERRMVIDIPEFYVGSVLAVTMSDPNTVSKQHRFVGICIRREKQGLQHTFTLRNVIDGLGIEIMYEIYNPTILRIETLLLEKRLDEDLTYLADALPEYTTFKFNMEPVSHTAGKPVPVNPLKVKLKPPPWTL

SEQ ID NO: 168634 - protein, 97 aa, Heterodera glycines; identical to SEQ ID NO: 163309

SEQ ID NO: 168635 - protein, 92 aa, Heterodera glycines; identical to SEQ ID NO: 148997

SEQ ID NO: 168636 - protein, 52 aa, Heterodera glycines
WSGVRGLAANSEYWSNRPKRRLSRCLMSDFVFNGSQSFFIICLFNAMAQNPS

SEQ ID NO: 168637 - protein, 51 aa, Heterodera glycines; identical to SEQ ID NO: 166750

SEQ ID NO: 168638 - protein, 155 aa, Heterodera glycines; identical to SEQ ID NO: 163602

SEQ ID NO: 168639 - protein, 261 aa, Heterodera glycines
  unsure (1)..(261): unsure at all Xaa locations
MNNYEFAMNSPHMEMAKFKEFMDDSSEEFVALSPMIQNQRDWSPYSNQGGTVCVLVGDDFVVVANDTRLTGDAEIEILSRKCEKTHILTNKIIMTSCGFYGDVLQLRRILELRINHFEFIYQRPMSLDQCGEMLSRTLYSRRXFFPYFTGTIICGITSDGRGDLYSYDPVGCIETKLFEASGNGGSTLSTFFENQWAYSTVAPEERKNMPKRTLERALSVIRDAFRGLSERETTTGDSLNVYWLQAGDEKVHQETYRLRGD

SEQ ID NO: 168640 - protein, 71 aa, Heterodera glycines; identical to SEQ ID NO: 162404

SEQ ID NO: 168641 - protein, 100 aa, Heterodera glycines
YHFIPKMSFLRLITFVLLITLCSLPSLVESGLIGIVGTPVEAAWCGVLGKESSHCPTAGGGQHGGGGGGGGGGNYGGGAPGGNYGGSSGSYNGHRARRFA

SEQ ID NO: 168642 - protein, 68 aa, Heterodera glycines; identical to SEQ ID NO: 163192

SEQ ID NO: 168643 - protein, 274 aa, Heterodera glycines
RIWLRPKIPYHNNDNLITFTHFDVDMALLVFSEAVDATSVMSLIGTTAHSLLAISPFSMAPQSSKWCRAKVWLASGGISFSPSAGVFRAGSPRFVNTDFLTKYFSSSPSCTRTLPRKALTSLVSMCEELIAEENNPWEVSALTSARLALDGITQETFKLTEQNCEKLKQFDPQRSAMYDEMFDKVRIIHELTKNTSDTPEQSQLDLLMEAKSDRLNLNGIGLISLLHLRPLSGLVQELNLQNNRVTSDQITQLCSFAALTSLTLDGNPIDRLPL

SEQ ID NO: 168644 - protein, 102 aa, Heterodera glycines
DIGTGKVTDYVKFDAGNICMITGGHNIGRVGIVGHRERHPGSFDIVHIKDSAGHGHSFATRMTNVFIIGKGATPLISLPASKGIRLSIAEERDRRLAQKQKV

SEQ ID NO: 168645 - protein, 262 aa, Heterodera glycines
MARGPKKHLKRLAAPKKWMLDKLGGVFAPRPMCGPHKLRESLPLILFLRNRLKYAQSYNEARMICKQRLIKVDGKVRTEMRFPCGIMDVISIEKTNETFRLLNDVKGRFVIHRIQSREGQYKLCKVKKQAVGDKQVPYIVTHDARTIRYPDPHIKADDTVVIDIGTGKVTDYVKFDAGNICMITGGHNIGRVGIVRHRERHPGSFDIVHIKDAAGHSFATRMTNVFIIGKGATPLISLPASKGIRLSIAEERDRRLAQKQKV

SEQ ID NO: 168646 - protein, 157 aa, Heterodera glycines
MRLEKCWFCSSTIYPGHGIQFVRNDATVFKFCRSKCNKLFKKKKNPRKLKWTKASRRIRGKELVNDVTQAMEIRRNEPTKYDRNLWETAVEAVKEIHSIRHRRYGEHIKSTLKPGKQAVKRAMVEKARKKVHLIRAPVAMGEDDEKLEVVEDGEQKT

SEQ ID NO: 168647 - protein, 222 aa, Heterodera glycines
KCTHRFYSTEPLVKKLTVIGSGLMGAGIAQVSAQANVKVVLVDQSQSIVEKAKSGIENSIKRVAKKQFEDPGKQNELVTRALSNISLSTDISQAVSGADLVIEAISENLDVKRKLFAEVESALPQNGKMATNTSSLTLADIAANLKRKDSFGGLHFFNPVPIMKLLEVVRFDGTSEETFNVLMDFGKTIGKTTVVCKDTPGFIVNRLLVPFMLEAMRMFDRG

SEQ ID NO: 168648 - protein, 150 aa, Heterodera glycines; identical to SEQ ID NO: 163662

SEQ ID NO: 168649 - protein, 183 aa, Heterodera glycines
MGPAALLLLLPSLLLLFLLIRALLELIPVSRLDKRSVLITGCDSGFGFDLALRCLGAGMRVFAGCLTQTGIQSLKKSAQEKGIAVELLEPIELDVTSDESVAKALEFVERKLGPGKGLHALVNNAGISGNESWDDWLIPKDYEDVFQVNTLGTIRVTHAFKRLVKRERESRIVIMASSCGRVA

SEQ ID NO: 168650 - protein, 148 aa, Heterodera glycines
MSSHSSSVVVDNCCPPSQMTTSSSPAAFRSSALAFLQFLNKSVTPFHAVESVEAILKSANFVQKSEYDKLQIQPKDRFYVKKSETSIFAFAAGGAFKPSEAGVSIVVAHTDSPCLRIKPVSKKTSEQFLQVGVSLYGGGLWRTWFDRD

SEQ ID NO: 168651 - protein, 205 aa, Heterodera glycines
MVAANLKLSLIFVAGFCLLFIADSDAGKSCKPGEKGPPGPPGKPGNKGKPGVCKPKYETTSKYGTTTSKYDTTTSKYGTTTPEYDTTTSKYDTTTSKYDTTTSDYGTTTSKYDTTTSKYDTTTSKYDTTTSKYGTTTQKYRGKRFADAVLVRAARAEYDADCPAGPPGDAGIAGPPGPPRRAGQMLWQRVQRVQRKGVQTQQAQH

SEQ ID NO: 168652 - protein, 47 aa, Heterodera glycines
EITNSGKWDCIILHDVDLVPEHDHNLYRCFKDHPTHFFRRFDENNYA

SEQ ID NO: 168653 - protein, 104 aa, Heterodera glycines
MCCINSKMLLLVAAFVVLLCLLNQNVGAEKIIVLYNGKKYDLTEFHKSHPGGEEVLKKVNGKDVKEVKIMYLEGKKGVKTDHLVQHKHSKHTINEFLPTFEIKH

SEQ ID NO: 168654 - protein, 170 aa, Heterodera glycines
MRSVKHGGKKGMRFRYKLSAVKRQNKKQKKKQRNIAGCSLIKKAWQTQLSSRQNLSAMGLVYDPNEALKKNPEFAMEMDQSEIEVIGLPEAKALGSVKEQKKATKSKKACPKLNKSEAESSKVVLELQQIALEGAQQMAEQKQRKRERAKLQQSDIEFCQKMLQRHGENY

SEQ ID NO: 168655 - protein, 199 aa, Heterodera glycines; identical to SEQ ID NO: 164379

SEQ ID NO: 168656 - protein, 172 aa, Heterodera glycines; identical to SEQ ID NO: 163598

SEQ ID NO: 168657 - protein, 152 aa, Heterodera glycines; identical to SEQ ID NO: 163840

SEQ ID NO: 168658 - protein, 158 aa, Heterodera glycines
SLSCPFRFLLLFLALVIKFHPLRSFWPSLPQMTEVPPNARQWTLHFGGLVEAVNGAHIDPSGRTDLLKVLDRAKRDGSLQLDGGEITLLECDCDAVRVSSAKVDESSKPLAFIPLHQLSSVGFVHEPPQNILALKVGDVDENKPDQFDLIILYTSTEE

SEQ ID NO: 168659 - protein, 238 aa, Heterodera glycines; identical to SEQ ID NO: 163456

SEQ ID NO: 168660 - protein, 223 aa, Heterodera glycines; identical to SEQ ID NO: 163957

SEQ ID NO: 168661 - protein, 156 aa, Heterodera glycines
LVLMEGIDQPVTKTCTIVEKDYDQDELFIFRPLKFNTCSVVKLSIEPINPSELPKMLDSLRKVNKSYPLLTTRVEESGEHVMLGTGELYMDCVMHDMRKVFSEIDIKVADPVVSFCETVVETSSLKCFAQTPNQKNKITMIAEPLEKGLAEDIEGE

SEQ ID NO: 168662 - protein, 183 aa, Heterodera glycines
MLRKLKANRERPPSLIFIIRDGLDEGKVDNALSSEIGLFRESCSQISQSWKPKFVYCLADKRHNRRFFEVEERLPDAAQPRNVCNPQPGSAVDRKLTRSGVLNLYVQAHHPVRGTAKIPEFIFPCNEVCATKEELEAFINGLCHSWQIVKAATSLPVPVYQAHELAKRGRSNYMELRRMAPER

SEQ ID NO: 168663 - protein, 84 aa, Heterodera glycines; identical to SEQ ID NO: 163684

SEQ ID NO: 168664 - protein, 78 aa, Heterodera glycines
HGINIWTFRYFLYGSLLTVQPCANKQNDTQQSRRTHNAQQHFPLNIFLLILRFQFGNAFRQLDKSPPHHLQLLQRVLV

SEQ ID NO: 168665 - protein, 105 aa, Heterodera glycines
AHLSLTYFMKRVKTFIRHKSKLHQNLVIRLAQFDGWFWADFAFLPLAMCPLFVEAGPGIGQSSPGPTKSIERLREKRTNRFILRNNAEQPTSKKRGDKRKAFKAK

SEQ ID NO: 168666 - protein, 212 aa, Heterodera glycines; identical to SEQ ID NO: 163593

SEQ ID NO: 168667 - protein, 208 aa, Heterodera glycines
LQLKNIKYLPFSKIFPGMSADKTGALFVGDIILAVNGESLLNARHDEAVRALKQAGKMVNLQVQYRRDLHLRRENMLHRLSWEESRVGASSAGPTVNGQSAGEALRSFGLKLAFVTRNPLEEEDPENRTIEIRSHSARHILTLRCSSATEADAWFEAIHSCADTLLTQALATVNLILGQSPQVLRMGWMAEQDAAIGWRAVFVALTVN

SEQ ID NO: 168668 - protein, 400 aa, Heterodera glycines
TTLPLPPMLCDTLGTDKNKRTLLVYGHLDVQPAAFEDGWNTEPFQLIEKDGKLFGRGSTDDKGPVLGWLNVIETMQGLGIDMPINIKFVFEGMEECGSDGLDECLEQRKDFLSGVDFVCISDNYWLGKQKPCITYGLRGLSPFAIEISGPNQDLHSGVYGGTIHEPMNDLCWLLSQLTDTRANSLIKNIDKMVAKLTEEERNTYTKIDFDLNGFKKDVGVEKLTSEDPKQILMRRWREPALSIHGIEGAFSGKGFKTVIPSKVTGKFSIRIVPDMVPEEVDKIVVDFVSEVWKGRGSPNKMKILPLGGTLAWLGDFKQPHFQAGVKAIKKVYGVEPDFTREGGSIPVTLTFQNLTGKSVMLLPMGASDDMAHSQNEKLNVTNYVNGMKMFAAYIFECAKI

SEQ ID NO: 168669 - protein, 32 aa, Heterodera glycines
FLVKNFPKHFLSKKGIKKFIYIIILFLFGLIF

SEQ ID NO: 168670 - protein, 152 aa, Heterodera glycines
MGRVRTKTVKKASRVMIEKYYPRLTLDFQSNKKVASEVASISSKRLRNKIAGFTTHLMRRIQKGPVRGISFKLQEEERERKDNYVPDVSALEQNELVVDTETAALLSSLDIKLPQIRTVAVTAQGERQGRNAVVGANFRGDRGDRPRRPKTQ

SEQ ID NO: 168671 - protein, 153 aa, Heterodera glycines
MIDCHCHLADESFNEDISQDDFERILELAHQFPDFIFPCLGMHPVQRGHISCSEEMYKNFEVDKWIRTHSDQLIAVGEVGLDFKPQHLKNGDADKEEQRKVFRAQIELAKELQLPLNVHSRSAGTPVIEWLAAHGAQNVLLHAFSGNVKNAQK

SEQ ID NO: 168672 - protein, 157 aa, Heterodera glycines
MASPLRLPQRIGAHHFWHNFDNFLFDADGVLWREQQPLEGAVELIGTLLKAGKKVVVVTNNSTQSCAEYVKKCQRIGFTDLDEQNIVSSGMVLAHQLNKMKRSAEFGSTAHLPVYLFGSVGLQRLLKESGIDSFGTGPDPIPADTATFVSDLPNLDL

SEQ ID NO: 168673 - protein, 60 aa, Heterodera glycines; identical to SEQ ID NO: 166742

SEQ ID NO: 168674 - protein, 251 aa, Heterodera glycines
MIRLIIDEPTELCATLFQQHARTMLDQVDIMLLLHRQDGEATPGELICRSSRRVLPCVRIDDTFLPRGEYLLCAHSFSKFGEQMVSGTIVIHSSREIQTMKLRTTTLDDLRQSMCSLLLKEGVLQNSSPGIATRYLTNEFAGLVLMVDNYSSDNCLKVHSDCQNSTNVLSTRSSLLAFDSIPPLHRQVVTLLTHFEPSQSFMVTHRWVYHQTKFPQLRDFVPCTEFASAQNFPPLQTETIGYLHGPFPVYK

SEQ ID NO: 168675 - protein, 156 aa, Heterodera glycines
ANLQQQTHGPIAGTDYDSADEYVVIEQEEETDLEKNSTLPETVATNTNSTPSDVQSVAASVGTLDAVADIGNGLDGAKLSVSSVFPQNAMSGSNYSQNGFNSSIFGSFVMEDQLRDLVRSENEQNRLMLDSIKNAIGELTKQKSNNNELNALISQQ

SEQ ID NO: 168676 - protein, 293 aa, Heterodera glycines
MLFLPPSLFLLLFLLHRPFANALGCMSAVCAAGGPSPSSHAVNRIIRCASDSFCGHFRALRRNDQFVEAVDLSCPEFAVVRAPFDGEISAYRPMGGSRAQEGTKGECVPDQGVRIDGRGQWQGYHALISSVQLFRFGGEVNAGQRIGVARDLECAGTRPKPRGDENFVRMELFREDKPIDPTHHLIDCMCTGQICETNRANALEGLPFKFDSRFNGVRGWEIVCPNVRPEEPNSSGESPEQSDNRQTMSPKIYSPIEGEVIGRVRLSASSNSQSYSGCANEGIFVVGTGKWTD

SEQ ID NO: 168677 - protein, 271 aa, Heterodera glycines
MYTPPAARARPPNPKNPKNSQPTVHGTKKKQKKLVGTALSRPRFSSLSLSPTHQINQSTIKRHDQTIVLLRRVRDGSREEAAGAEEIHEARFRRTGGGGCLWHFVTTSRHGQALVLRNCREMVGRRAMLWRTAVQCRRTGGRLAQQTVRRGRGDGGTITHHSDGTFALGQLLIGRGERVIVTITFCRIMVVDRIGAVHGECGAFVEQAGQHTVKRVDAFLILQKVWHNVQVRFRHGTAAEQRRFLLLWWKRGGGSEYGGRGRRAGLLVGHF

SEQ ID NO: 168678 - protein, 264 aa, Heterodera glycines; identical to SEQ ID NO: 162992
  unsure (1)..(264): unsure at all Xaa locations

SEQ ID NO: 168679 - protein, 129 aa, Heterodera glycines; identical to SEQ ID NO: 163586

SEQ ID NO: 168680 - protein, 81 aa, Heterodera glycines
PGDTPQITPIQIEGTVHMSQFVTEFYRSNLELIKGRFLPGDGIGEKEQPMEQSEARTLKEEANRPRICLATRPSSNNSRTR

SEQ ID NO: 168681 - protein, 144 aa, Heterodera glycines
MKDIATEESIAQRRLNLKANFMRQLQIRRGVLPSEIPPVGVATNAVPTMGRKFRKPLESRFPPAKPRFGLGMTAADFEDKTDNCSSLAKGPSLTETNAPKGRNVRPKAINCYINPSQSVSTWPTSNDTDSDGQSPSPTSSASVT

SEQ ID NO: 168682 - protein, 169 aa, Heterodera glycines
MECVRHLLHLLLLLTFSGQLLVTLADLYDDYEQCKSSGHFGAEDGSPSLVCDSEGRLTPQALAQLNGILTDMGRDAGCQCADGCDGKPFSVRLLVTSGERVEQSGGTTALNETAGRIWESERMGTEQCDNGMLMLYIRDQKRMVTFQGHRRLQIYSDRDIDNLHELTSR

SEQ ID NO: 168683 - protein, 334 aa, Heterodera glycines; identical to SEQ ID NO: 163589

SEQ ID NO: 168684 - protein, 135 aa, Heterodera glycines; identical to SEQ ID NO: 163588

SEQ ID NO: 168685 - protein, 157 aa, Heterodera glycines
LSFLFAQKGHVAISTKGSVRVARLSLRFIGAAHTEWHDKCTGAPFESVDRVLDEYRDLTSELSSLCDGSTELSPGEHSVAFHFKLPMDSVSTIAKDGHGVVKYFCVASLDLPDDGGDNEIVAEKEFAVTAYLNLDAPHFREPAHSSEQITKGGVFCG

SEQ ID NO: 168686 - protein, 59 aa, Heterodera glycines; identical to SEQ ID NO: 166735

SEQ ID NO: 168687 - protein, 77 aa, Heterodera glycines
  unsure (1)..(77): unsure at all Xaa locations
LIEIFIYKXXKKKKKKKKNSRGGPVPNSPYSESYYNSLAVVLQRRDWENPGVTQLNRLAAHPPFASWGNSEEARTDR

SEQ ID NO: 168688 - protein, 66 aa, Heterodera glycines; identical to SEQ ID NO: 152131

SEQ ID NO: 168689 - protein, 68 aa, Heterodera glycines
CIFLQSLTISKISPPTLVTFPIVLFASFLSLFISFRFKAFSVFSLSLHSLRVFLFNYLFSYIIVDYTA

SEQ ID NO: 168690 - protein, 253 aa, Heterodera glycines
MAHMAKKASNFLIGDFNSVDFDNMADQLGNHGYVSPCNMLTALVYIMRLKESNERDFLAFNPTELFVSSLVLATKYLNDGTLQEFVWNDEWASVSGLALPKLNELEIRLLTSLRWDVSIQSEDFEKVLARLEGFVASEMAQQNGVMSYNELCILSNTHGFNRSILCLLTVLLKFLFVLLAFHLALLAGLSVLNMAVSRKQELAASDACIYHHGWDDCSHPPILLANERKIDANLTKVVHKDDFFAFVHAFSIS

SEQ ID NO: 168691 - protein, 258 aa, Heterodera glycines
MGEFRVKFRQLEADIEELKGKNEAIQKRLVEFEQKLSTSANYTRIVSGQEMIRILAKNNWNQTDSHKELFLFKPNLLKVVCLGAEKVPRTVRAKDRAPKNLEIVYYEVKILSAEQKDFDGTQNDSIGIGFAPKSMPLGTKVGTHPGTFAYFNDGNVRGHRIVGSTKQNLAKFDAGDVIGCGLNLTSKEIILTKNGERLGKKEQPYHRFISSHYGSELFDSNFFFASKETDDLYPAISLNNPGDEVEANFGPNFKYTLN

SEQ ID NO: 168692 - protein, 496 aa, Heterodera glycines
MLAATGRWPSSSSNSGLRIAMAICAILACCSLPNSTEAALAEVGQQPKGNNPLLYSVDDPIVHLDADTFEDTVLRPNRDRAYIVEFYKDWCGYCRRFAPYFKVLSESIKSWPFVQVAAINCADAYNVKICKANDIPTVPKLKYFPRNARSFEEGQVIEHSYESAMEMREQVHKKIMEEFNAETGKGNADFYLQKMEAQRQHNNENSQPEPWRDMPNSTQFLAQLFEKDAKDGLPFSLDLLLYKPSVEVRQVLVGSADEVPRNVPKPAKGKATEAAAFKLPYVRAMERGKTEPILAESLNDQTLAKLRELVKPMMVELNKTEQAKAHHKEPVQVVDCAQSPEKCKQMFFVSETDMLKAIHTALLDEVISSGGDEINGDRFAALRKFVELLIQRFPKKTFERNPQLSAHPKGTALSSIGKPLLRSQRAFKVFEQMKRFLDAKAGDGKVSMDEWRAEFDQAKAFENAKFKQNGDPFPVTAEWEHCKGTRTIFRGFTCGL

SEQ ID NO: 168693 - protein, 202 aa, Heterodera glycines
KKIDCHPPMANSGEHSSRRQQQQQRHPNTTAENNSDIEGTAHRVASVTLNTESDSRTSADLPAYPFRSKRRKKLPRRDKQQGADMDVDEHQPPWKKLSVNTVDNLTLPSCKVQMDWEHGHGQALSTANDSTQNQSSSTTRQASDMENSVSDQFSHSQSESEASTSNIDADDEQSDWPGNELARHPQLSSSSSVIVPFQLAPP

SEQ ID NO: 168694 - protein, 257 aa, Heterodera glycines
SLSQMPFLSLFSSVSAFALLSLLSFSSSVHHFHHNHHSDSSKGHNGHHQQKDHQTAQEIPSNSFPCACGGHSSGGENARWMNGMPANGVPLFLFPDNVLRLVGVVLRSENAFHRDNNELARHLFHLLAHQFPRKWFIVGIGTMPSNGANEPKMWAREGIDALNGTVQLQSPPGYGSFPFLDGRRFQRENGSKIWYFVYAVEPMTDKAKDGLPKQSLAKCLSEGCPSRDNFASLCANNRRQLGTVVEFDQSSEMSIFA

SEQ ID NO: 168695 - protein, 36 aa, Heterodera glycines
EWKNSKIFHYFLFCFLKFKNPFKTLEKFVATLSIFS

SEQ ID NO: 168696 - protein, 139 aa, Heterodera glycines
EGNPAPTIVWKKGGRKMPLTDDRVRCQTDGDTGHVSLIISKCRPQDGDEYTLMVKNAHGKHKVGAKLLVTPAAESNLDIRAKQKKRGTGFSNSEQEKQRQRSDAEPKSKAERRKRQVYVVEEPRDTFVVPLNSQHANEK

SEQ ID NO: 168697 - protein, 106 aa, Heterodera glycines
NHYSRPGSYTRVYGQQSLYTPSVMAPEAKLATERRTYSGYNYVAGEHSFNLSTKPWSQSNYRFLRVSHISSVPWYFHGQTSNVRHYNSYRPPSFTPRLSTYWKSYF

SEQ ID NO: 168698 - protein, 73 aa, Heterodera glycines
VRSNVYFLGAKHQKKQNKTFHIKEKSTNFFLPVSRILSEASLSLSVQTIYHWPPPPCCCCSAGAGNGTPSPLI

SEQ ID NO: 168699 - protein, 67 aa, Heterodera glycines
AVLIETTLGDLVIDLFVDERPNACKNFLKLCKNKYYNLCQFFTIEPKYIAPTGDPTNSGRMGESIYG

SEQ ID NO: 168700 - protein, 193 aa, Heterodera glycines
MISSSKFCTNFDQLFNHLRLLCSNDAGAAHYGTELMPIIKENPFFGALCSVMAEEKQKIRAMTAEISCAAMALAFSLDSPTDDAKDKNCAVDQTLSECKKYYLEENELDGETKDKMKQTLEEHEQFGQLIEQNSVACLHTSRRLFAVHAQLRPVTLGDVQQFGIVLKLSTKKWQNELKDAVCSQLLLIKSRAG

SEQ ID NO: 168701 - protein, 46 aa, Heterodera glycines; identical to SEQ ID NO: 162666

SEQ ID NO: 168702 - protein, 316 aa, Heterodera glycines
MATACKLEMSLDEIIKANKSKTNQASINGRKTQMTGKRLIRGNIAKGKPFIRKQINGQNQTKKFGLKRVGINVRRGRPLRKSNRVVVMRKNFAAKNRAVISATKNLVNKLVKKALNKSNVSPRGKRFIANSARRVRTIMLNKVSPRSRVITRQRQRIVAVQPQQQPVFVQRVVRGRGPIRYASDAALVPQTMKMVPKRRFRINPMQQQQPVLLVQNQSPKRRLPSFSSMSVRQHVNALRRATTVQQLQTQFVNQQLPIRQQFRGRQAITTPVVPNRSRGKQQFILDQPVQAGPQFMKFSPRRQRRQTASTNTSSFN

SEQ ID NO: 168703 - protein, 176 aa, Heterodera glycines; identical to SEQ ID NO: 163953

SEQ ID NO: 168704 - protein, 86 aa, Heterodera glycines; identical to SEQ ID NO: 163944

SEQ ID NO: 168705 - protein, 257 aa, Heterodera glycines; identical to SEQ ID NO: 163532

SEQ ID NO: 168706 - protein, 113 aa, Heterodera glycines
MEHMWSCATKWQWEKPGVSMKWEITDTLTEAAVDTDCPSRKNRMNNCCYLQTECYNKQIGQKSCDNQFCECMERATAGKKRCSIWEGPGFCRHYRLYGESGYRAAAPPFWSSC

SEQ ID NO: 168707 - protein, 131 aa, Heterodera glycines; identical to SEQ ID NO: 130337

SEQ ID NO: 168708 - protein, 41 aa, Heterodera glycines
HQNLIELPCEERRKGQISEEKEGQKSLVKWAESAETKNNEL

SEQ ID NO: 168709 - protein, 203 aa, Heterodera glycines
SDIQKAIQALEREYAEQKELFEKWKEENASEADTEPYNAYVEQFRGWEKDVMDNLKELRASIARQPVAPEPELPMVDLDTQLNNLLDRVDTPQFIMAFMSMSQQDPTFLAKAFEVVMEECRTTGFSNPILPQSATIPSLRPVHRLPTPLHQQPPGVPSASSSARHQSARSPGSLYLPPPLQPKAYVQGSSLLGPSRPTSTVSY

SEQ ID NO: 168710 - protein, 104 aa, Heterodera glycines
CRFFLKISGGFLCDVKRNLQNFQENPHKRTPSKNKLFENLAMPPATWFPLARFSLNMAQFLGPRDAETSKGSPKINLGSPILSFRSILPDTSSNAVDSWVPLKQ

SEQ ID NO: 168711 - protein, 286 aa, Heterodera glycines; identical to SEQ ID NO: 163182
  unsure (1)..(286): unsure at all Xaa locations

SEQ ID NO: 168712 - protein, 170 aa, Heterodera glycines
LFSFPEVSCERTATESIMPPGFKEYFFLDKLAKAFNIVKQTGGIRAAIKQRYLMDTNRAGTLIGEDQFGNRYFEDNTYFVPRNRYVVYAERVWLDYDASQIPPEWHRWLHHICDKPPTVEPPPERKTWMLEHEPNNSIVMSKKYVPYSTTRPKVEGWVPGRKRSEEGTTH

SEQ ID NO: 168713 - protein, 188 aa, Heterodera glycines; identical to SEQ ID NO: 162441

SEQ ID NO: 168714 - protein, 83 aa, Heterodera glycines; identical to SEQ ID NO: 163578

SEQ ID NO: 168715 - protein, 257 aa, Heterodera glycines
  unsure (1)..(257): unsure at all Xaa locations
ILRHNLAAIRDIVYTVEFALGELVESLGRISLDVREVRQQNQLRQLARPVKTTLAMLKRVRHSLDSTGWSLSTLSRSAGTYAGQDALDQFVAMLPQLPKDCYKLVQWVYSLSVWRDLPRGGATSVFLPPSSGTVPFHAKMHPPPPPPAPFPQQRPSSPSSSLLNYYSSESIEDEQNNNNEDSFRNWATVPMNGSLTDRHGGQAKGGRMFVEQQQWHPQNGGALANDVMDGGESTSSTSSILTAEERTGGGXRRKKQW

SEQ ID NO: 168716 - protein, 280 aa, Heterodera glycines
LAGKTLIGFFLPQMIILFFSPFVLHKFCVFRWNSKGTHWRREIIPKSERELPTRDNGSIVDYNKFELWRREYEEGVAQLEQEHVKKLKELEESFFKELDEQNRSLDSEVNALDIAIPPLGNGEESLANCATQLGQCQHHPNPLSANHGITTAISGKKFLRSRQNDVIPSSSVGAESALHLGAIGLTDAAGTAKRRTQTKKSGSPFGFLGFGRTEGAVGGFAGAIGGGPTIGGTSTSSLMLPYLLSESAISEDVHSLGSDSANHCHLAERSSAGCGGLSQD

SEQ ID NO: 168717 - protein, 96 aa, Heterodera glycines; identical to SEQ ID NO: 163681

SEQ ID NO: 168718 - protein, 330 aa, Heterodera glycines
MGSFSKLAIDQLELKGKRVLMRVDFNVPIKDGKVTSNQRIVAALSTIKYAIDHEAKSVVLMSHLGRPDGQAQAKYSMKPVHEELERLLGKTVVFLTDCVGTEIENATADPKPGTIILLENLRFHVEEEGKGKNSAGETVKASKEAVNAFRASLSKHGNLYVNDAFGTAHRAHSSMVGCAMEKRASGFLMKKELEYFAKALESPTRPFLAILGGAKVADKIQLINNLLDKVDEMVICGGMAFTFYKVLTGKSIGKSLFDEEGSKIINDLMAKAKDKNVKIHQPVDFVVGDEFKEGTPFANVDAKDGIPNGKMGLDIGQETLKQFAEVIGRA

SEQ ID NO: 168719 - protein, 120 aa, Heterodera glycines; identical to SEQ ID NO: 163484

SEQ ID NO: 168720 - protein, 145 aa, Heterodera glycines
MSSASSPVPSLILNSGFPMSQIGFGTWMCKPTEVNEIVKSAIRNGYRHLDCAFIYQNQSEIGAALKDMLQHGEIKREDLFITSKVWNTFHSFDAALANVQKSLEQLGLDYLDLCLIHWPMGYKEGTELFPKDAEGQKVFLSDVDF

SEQ ID NO: 168721 - protein, 146 aa, Heterodera glycines
MSLYDDIGIESSTSVQVKEENLEKKADDFPTPNSAQKPQNVTVSAVSAVNKMNLSFLKSQLEAKKAILQNAAAAASQNKSAPGVAFAQPLPATLPNMPQLLNKKGGTFKLKPHKAIPLPIDSTGAFTLVPKSLKEDKVFLFGELMV

SEQ ID NO: 168722 - protein, 208 aa, Heterodera glycines
MQSVQSSATAAVTAASTVPLSIQNEILWIKQDALQVRNAVILLEQEKDSLRKAIRKLKLENGRLKTKVKTLNEKVAKISNEEMDDEEGKLAPESELDYDELNRGDFYLIGGVHDPISLRFEAAIRDQNAVEHKSAERYYWYKMAEFFGDEEAMKSILHAQNVQQAEEAMKNIKGFDVAEWDKVKLKHWEDGQRLKLEQVRWIENLLVL

SEQ ID NO: 168723 - protein, 218 aa, Heterodera glycines; identical to SEQ ID NO: 163812

SEQ ID NO: 168724 - protein, 160 aa, Heterodera glycines
VTFFLMLATVRFHSVTNNRIDCCQQTLFSLDDSENLPGTDFSVGKAKSKLLSDGRREQQKMAKKTNGGKTEGIGKTAAGGSRGSDSLLTDEVQLDGGAADGASDDESGDFLPIALGTKCAAGHAEENGRANWAANWRLSGRRCLKRASVVLGCCFPWAVG

SEQ ID NO: 168725 - protein, 140 aa, Heterodera glycines
MLRALLSPEIFVEIVNCYQELMVVEGCLQIPCCVEFPPLRKFVAANAIRSRQLRQEHLERKWHLELARDACVSKLALSELSWDASLSFKTVRVCMEKLRRIGPEKSAQFARLSIHLSNSPKLFVMFNGRLSVPIDWVKEL

SEQ ID NO: 168726 - protein, 62 aa, Heterodera glycines
FKQIYFYATVRHSAAAKETKKKNSKNNKSAKFHVKKDKVNQIFLGADFSPRFSASLFYCRVQ

SEQ ID NO: 168727 - protein, 213 aa, Heterodera glycines
MVKFWLTLFFVFTGNNLYSIFAHKPNFSQCGISDFEPDLDNVPNVKIGTNHIYKGQPVENANSMPWMVTLLSLQGLCTGTIISHKYILTAYHCVSGIISVPSSIQISYGTVNVANEKHKTNARNIIIHPNASLSEMRVKINGSEFGTDSVSNDLAIIEVENALKFSPNVGPICLFGLDASGNDKFGTFSPLINSQFIIAGWGLTQPMCQKYPT

SEQ ID NO: 168728 - protein, 210 aa, Heterodera glycines
  unsure (1)..(210): unsure at all Xaa locations
MTSPFHSLVESQREFFRTGKTAELAHRRQQLKKLRKTILDNSEFLCEAVQKDLKRDAKLNYPLEISSVIIEIEYVLDNLERWTAPLNVEKTFTTLLDSPQIVREPKGVVLLIGPWNYPLNTLLMPLVDVLAAGNTAILKPSEVASNTAAAVDEIISKAFDRNYLAVVQGGVEQTGELXLKEKFDHIXFTGSALVARHISRAAAEHLTPCT

SEQ ID NO: 168729 - protein, 85 aa, Heterodera glycines
NSSSDAPAAFGRAFALCWRANTNSKNSQTRNCRSYRWECSKSKEVEECDPSADGRNSSLFALHIVKQISYLLFYNNLNRIKRKSA

SEQ ID NO: 168730 - protein, 154 aa, Heterodera glycines
MTRSRSGSRCGDVVRYVLGQNTHQQSYNQHIYDDIDVFLDFSHCRPSDQERALFFELEAVLQFAQRSADCLAIYGAGASAEVRAALQNCDDADIQNASFAIVRQFVRRIRKYFETAQRIEKVVPELLWELCSGPLPPVEQLDSAQALCKQLARL

SEQ ID NO: 168731 - protein, 197 aa, Heterodera glycines; identical to SEQ ID NO: 163050

SEQ ID NO: 168732 - protein, 218 aa, Heterodera glycines
  unsure (1)..(218): unsure at all Xaa locations
ETHIVLGIGTVCSLLAIIATVVTLPSLYSEMNQLSNKVRDGVEAFRVNTDSAWTDLMDVQVVVAPPSKARDNPFSSIFRAKRQLPGHCHCGPPQRPNCPPGPPGPAGPPGQPGQPGSAGLQGQPGAPGQPAPPCPPQNIPCPLCPAGPPGSPGTQGPPGQQGAPGQPGAPAPGGGQGPPGASGPQGXPGQPGXSGTPGQPGQPGNNAVIYNTIPGPEG

SEQ ID NO: 168733 - protein, 250 aa, Heterodera glycines
MQETHIVLGIASLCSLLAIIATVVTLPSLYSEMNQLNNKVRDGVEAFRVNTDSAWTDLMDVQVVVAPPSKARDNPFNSIFRAKRQLPGHCHCGPPQRPNCPPGPPGPSGPPGQPGQPGGAGLPGQPGAPGQPAPPCPPQNIPCPRCPAGPPGSPGGQGPPGQQGAPGQPGAPAPGGGQGPPGASGPQGQPGQPGRSGTPGQPGQPGNNAVIFNTIPGPSGAPGAPGQPGSPGSQGQPGQAGGEGPPGPTG

SEQ ID NO: 168734 - protein, 130 aa, Heterodera glycines; identical to SEQ ID NO: 166716

SEQ ID NO: 168735 - protein, 154 aa, Heterodera glycines
MNFVVRLSSKSRFLRLFPSSYSPFSSPFSSSPSTASSSVSSTPLLIITQRAADQLRRIAPPGEHLRICVDSGGCSGFEYKLTLDKRLDEAEDEVIKASEGAIVVVDKLSLQFLRGSKLDFAEDLMRSAFRITDNPLATLGCSCGASFAPKNQIE

SEQ ID NO: 168736 - protein, 350 aa, Heterodera glycines
LKIIIPKMASRDEIGQTVCDLVGNTPMVYLNKITDGCAAKIAVKVEWMNPAGSVKDRIGIAMVEEAERQGKIKPGITTIIEPTSGNTGIALAFVAVARGYRFIATMPSTMSGERRTLLRAFNAELVLTDPALGIKGCVERAEQLAAAIPNSFIPMQFANEANPEIHYRTTGPEIWRQTQGKVDACVFGIGTGGTITGSGRFLREKNPAIKFYAVEPVESPVLSGGKPNPHKIQGIGAGIVPPILDTKMYEEVVLVHSDEAIAMAKRLAREEGLLSGISSGANVVAALRVAQKPEMAGKLIVTVLPSSGERYLTSALYSDIRAEMEAMSHGETLEDNLKRLLKVEDANSKQ

SEQ ID NO: 168737 - protein, 160 aa, Heterodera glycines
LSSPSLLSSSSSSADAVKEYRLVLLGTQHKKPLFEKMCSAAQKFEQHIQYADIWYLTFQFKDSEEPVVVEITDPGTEKTGERQMAIQQKSDAIILCYSAFNPGSFLALESVTEDFQTFNGKPPATLLLCNEDQLAEEGFEDGHETDTADDGYGTNSGGGS

SEQ ID NO: 168738 - protein, 125 aa, Heterodera glycines
MYYSLSQIENHLFLNSRDLNPNMAAGASTSRNLLNVASVEIAAQNECFTVWEPLQLRQEWTISNFAKALDLATPGICMRSKNFRDESMPEICWQLCLYPGGKREENSGNVSLFLKMSTTQSQREF

SEQ ID NO: 168739 - protein, 423 aa, Heterodera glycines
PSPTPEVTFKDRSVHEIHLENGYTYVIEQNLKHFASVITVLAKFSEQILLQPTEDGLMLSASSSARSAYAKVKLCRQFFDRLRARENLGPDGEVFCRLATKSLMHIFKSAAQSSVGPVPSCSLELDPQSDFAYVHLQCLSGIRRCFVLSLREYAMVCDNVFNERQRLKNRVTAHAKMLATLLSPLDCSDLELVALADRFTACRYIPREEYGKVRRTEVQIPVDHCEQYRIEVPTRVVVNLRELRPILQFADLCGMSVSLHFDRAGRPLIVAVEENVDFAAEFVLGTLDEQLPLNEQQQQPTPQQQQEQQPVVQQREEQPPQHRHNQMLRHHSPAPAAVAERVEEEHNETPPNRDQMLMVQQEEDVQLSIRSTPILPIAALRQEEHNETAPNHGQMSIGPTPILAVAATVQQQQEAHNEISQND

SEQ ID NO: 168740 - protein, 153 aa, Heterodera glycines
MLFSLSHFSPIVQSLFASLFTWAVTALGAAVVFVFPSSNRVFLDASLGFSSGVMLAASFWSLLSPAIEISERQMAKLAFVPVAVGFALGAFFVYLSDRLTQNFNGSALSDQINQLENWHSANQQNGIHSENAPFDFETDRQRSENPENAGELA

SEQ ID NO: 168741 - protein, 88 aa, Heterodera glycines; identical to SEQ ID NO: 157977

SEQ ID NO: 168742 - protein, 93 aa, Heterodera glycines; identical to SEQ ID NO: 163567

SEQ ID NO: 168743 - protein, 119 aa, Heterodera glycines
FWTDLTGSEVKSTGEGPKGGEVAAVETLCPSRHSQPHISPCPSSLGSPCPLREPLNQIIQYFVCLFPMPSYPSSLSNAVPWKNSSSSSCTSSSLTFTTLSFPAPFRLHKERSIGKLKLG

SEQ ID NO: 168744 - protein, 174 aa, Heterodera glycines; identical to SEQ ID NO: 163565

SEQ ID NO: 168745 - protein, 373 aa, Heterodera glycines; identical to SEQ ID NO: 163564

SEQ ID NO: 168746 - protein, 159 aa, Heterodera glycines
TVDGDEKRAVRGAFNVIDRFISVEECSTDKFDDECAKKEGALTDGQKDVSDSLASECQQIRQNKRQFASNAVRQYMTGARCSLFFASPMIRPYNVYKIAEQMVDQSQKESLTRFLARVIPVEETCHANLDEIKTLLSEMVVKHLKGEKKDTPPTYAVEF

SEQ ID NO: 168747 - protein, 146 aa, Heterodera glycines
  unsure (1)..(146): unsure at all Xaa locations
MKVEKIKTRRGKKFLEDRAPKLVENDKVTLFVKGKKCSVMLNKILGELYQLKKPLANRLQRLNWPFFNDXSHKFDASLFVFGSSTKKRPNSLLFGRMYDHQMLDMVELQVENFVSSDEFKQVKSVTLGSKPCIILQGHLFESNGIL

SEQ ID NO: 168748 - protein, 109 aa, Heterodera glycines; identical to SEQ ID NO: 162453

SEQ ID NO: 168749 - protein, 123 aa, Heterodera glycines
MKFMASMVTSFPVSFFLFFSTALIHGTMGGLFWSKKPADSADDSLWSRYHDQNAMEELLEKVHSKCPNVTRLYSVGRSVQGRDLAVIEFSLHPGRHQICNSMSPFVSRGLSELQMTNHRQITS

SEQ ID NO: 168750 - protein, 158 aa, Heterodera glycines
MSEMNINSSSLSSSMLVRDLTLKPDVSKPRWDQSTYQGRARHFFAVLNPLNLFTSNQGLEESRNIVLDYRKGIFSPELTVERLWKAKHLYESAYHPMSDQKMLPFGRMCAQVPCNMVLIGGMLSFYKSPLAVVFWQWTNQSFNAVVNYTNRSGDSVST

SEQ ID NO: 168751 - protein, 139 aa, Heterodera glycines
PERDTKMDTTNAEVMDTKKEANAAAAAPVAASDNTAPAPMTWMMDGIVPRDVNVMVDRTTKELRKTTETDGFYDMSQRAQERVMLETAGKQGEIVKTKLKEAIEEARKMIERALGTVISYSEAPMESKMQLEQVFMTLT

SEQ ID NO: 168752 - protein, 176 aa, Heterodera glycines
MLSPTILCTSTNEKVKKEELKKALYAIFSQFGQIIDILAFKHLKMRGQSHVIFKEINSAATALRSMQGFPFYDKPMRIQFSREDSDVISKAKGTFVERPKKNIAVPKKKKKLAEGPTKKSKTSGKEGQQRSTAPPNKILFITNLPPECTEEMLRVVFQPLPGLRDILQVSNRTDIA

SEQ ID NO: 168753 - protein, 195 aa, Heterodera glycines
LSKCIVLVDYARQRQEWTFNKVSQLSTSVVELRNKIETEATRTRKNPGEVLLKIIRFYSSKLNVLMSKLRDRSSEVLLSSSMQKQILTLTAYVQQLDDNFVKAKDIDEVKQEVLEEAKQKLFDIARWSASLSLRGPPKTSTADDVENENLSSNIETEPKQEETKGEEEETLQQSMKEDEEEKGEEEEDEEEEEED

SEQ ID NO: 168754 - protein, 150 aa, Heterodera glycines
TNNFLKMLSRFSKITVRGYAKDLKFGSEGRKAMLSGVDMLADAVAVTMGPKGRNVVIEQSWGSPKITKDGVTVAKAIDFKDKFQNMGAKLVQDVANKTNEEAGDGTTCATVLARAIAKEGFENISKGANPVEVRKGLMNAVDQLVKELKA

SEQ ID NO: 168755 - protein, 177 aa, Heterodera glycines
LNYLNLFLLHMATPATIKKLEEKKLLAQQRKQMQQKDGSNGNAGAQLLSLSEQSDAPSSHLLVRTEPVEGAPPRHIDLRPLSGNYSNFRERRGEDFSTDVSAERPYGLSNYTNFDANSGPTAYAWPPQNYQPAFGPPPPLLTQQQNILQPLSRPSTFNTYRRPRTAANFSGKLKKQI

SEQ ID NO: 168756 - protein, 53 aa, Heterodera glycines
  unsure (1)..(53): unsure at all Xaa locations
XKRPLPISQKSIKGKFGGMASTHPNKYIRPSQGLIQCTEVRKMDNIRRKDRRN

SEQ ID NO: 168757 - protein, 176 aa, Heterodera glycines
LSIFDEFRRMDGRQILYQFLNFAMIVSSALMIWKGLMVVTGSESPIVVVLSGSMEPAFYRGDLLMLTNDLDDPIRAGDITVFKIEGRDIPIVHRVIKVHEKNDEETKFLTKGDNNMVDDRGLYAPGQYWLQRKDVVGRAKGFVPYVGMVTIIMNDYPKLKYTVLALLGLFVLLHRE

SEQ ID NO: 168758 - protein, 143 aa, Heterodera glycines
MNKLFGLLMLFAALMAHFIDCRPIRSSKRLVKVGVQLDNSEKTASASGNTYKLEFTNLSYKLVCQVKFRIELPQTATLDEYWNINPIGPADDHLFTLPVEQMYPGRSFTSARVKLNGVGEPKVTIMDTVDVLSTKPCPTVPNF

SEQ ID NO: 168759 - protein, 189 aa, Heterodera glycines
MQNLFPGKFGQAAQAANTAQMQMKAEHDPSAGFPWWVRFLAKGLGIVGGFVAIFFGVLALFTIHPMCMVAALLQLAAGFLTIALEAPFCCAFVDFIERIAQFSESRAYWQKAALYGGMGIVPILLCAGTETILGAGMICASGVAYGFMALGKKADRTTMLGGANTAGQDPAWSPQLNQPFPRPAGFFQP

SEQ ID NO: 168760 - protein, 139 aa, Heterodera glycines
ASQWAFLEQPIHQLLQCPADYGASEAQFGQSRAIVVGGADSAFLLQKTRFDDDWNGPSTMSTLLLAQYLQQSEGPLWNAVRGTGLAYGVSLYVMPDRKALSLDLYRCSELTKAYEQTRDTTLAVLNLDRLDTNLLESAK

SEQ ID NO: 168761 - protein, 156 aa, Heterodera glycines
MESGRSDEVLARLEAVRRRVLAAPMNVHFGGDPSQIRLGTCSSSASSPPITDIASQWAFLEQPIHQLLQCPADYGASEAQFGQSRAIVVGGADSAFLLQKTRFDDDWNGPSTMSTLLLAQYLQQSEGPLWNAVRGPGYAYGVSLYVMPDRKALSLD

SEQ ID NO: 168762 - protein, 102 aa, Heterodera glycines
LSVLRQTHCSFVTALSFLPQRSCDVKDLGHIGETISHNLPSKRCFLPGICADFRCALVSVSVDRTIQVHQFPFPTQSSFSAFLFRLSILTSVLYVLLWTLFA

SEQ ID NO: 168763 - protein, 137 aa, Heterodera glycines
  unsure (1)..(137): unsure at all Xaa locations
AICALIERAQNYXDTRRQSGAIDQAEILIIYGLRIEHLYYKYSSNEVEDEQLMDSLCKIVYAIGNAPLARQRAMLCQIYHHALHDRWHKAKNLLLMSHLQALVDHSDASTQILYNRTICQLGLCAFRHGFVREAHQN

SEQ ID NO: 168764 - protein, 158 aa, Heterodera glycines
LMLVGLDHLLPVRPVGLCLIEYSSTLSPSFLFVHFISNFSKSSSSAGTSDHHITFVSLHTTLGLLRMVMGKMAQRLNLDTFHFVSVSDFLGDSLLFDCDRLFSWITKEVLRSVLPDRPQLVVLDDLFLSHPSIRPAKLLQFLLALFVRLPDRSFFIMA

SEQ ID NO: 168765 - protein, 262 aa, Heterodera glycines; identical to SEQ ID NO: 163558

SEQ ID NO: 168766 - protein, 97 aa, Heterodera glycines
VPFKPINYSCTCTLHFLDFFTTRTFRGNQRDLARERNLKKQQQQKKQEQGTSTEKRMERDAEAMRLKQQKAAAKKAEEEKANAQAPKVVKVDPLKGL

SEQ ID NO: 168767 - protein, 74 aa, Heterodera glycines
  unsure (1)..(74): unsure at all Xaa locations
MTRGNQRDLARERNLKKQQQQKKQEQGXATEKRMERDAEAMRLKQQKAAAKKAEEEKANAQAPKVVKVDPLKGL

SEQ ID NO: 168768 - protein, 106 aa, Heterodera glycines; identical to SEQ ID NO: 166702

SEQ ID NO: 168769 - protein, 186 aa, Heterodera glycines
  unsure (1)..(186): unsure at all Xaa locations
TPIIKSSASLKFWSKFFDTRLNWHCRRNSTAKVVPKKVLRDNCYQSTSLDSGLRIATLPAYGQFTTIGVAIYAGSRNEVHYPPGTAHFLEKISFLSSQQFPDKAHTLDLLEKFGALIDCQSTRDTFVYAASCRVENAFDVLSIIADAVLRPNILDNXQPECEPLLTDWIHQAAFRSNTGGLSRQYY

SEQ ID NO: 168770 - protein, 157 aa, Heterodera glycines
IVFLVCCNAMPNFPCCPGSQQVVAVMSNYIGTFTSEDKSTVCSTAKNTVDGIKSELSSRGGCPSGGEAQIVNEIDRQLTNIAKMKINYEDGCPYNLGFARAMFDLAAAAAGHAGNGTEWQTMKGQFEQESQAIKAIGQEMNIEVTDVHFGHPSKGFS

SEQ ID NO: 168771 - protein, 121 aa, Heterodera glycines
  unsure (1)..(121): unsure at all Xaa locations
MSSLLLSIFPIVFLVCCNAMPNFPCCPGSQQVVAVMSKYIDTFSSAADXSTVCSTAKSTVDGIKNELSSRGGCQNGGEAQIVDGIDRQLKNIAKMEINYEDECPYNLGFARAMFDLAAAAA

SEQ ID NO: 168772 - protein, 234 aa, Heterodera glycines
TKPKFTTMSIIRRQFFATKLFSPQLASNKMAVLPVRHCVSVATPTQNDVPYNPSPTTAQTLDTLGIGTTVQPPEPKWQKAGLRIELNCADEQIFQSIVQEIVDRFGWDNSAYDYAMWRKAFGPNNFGMFFALDEDRLPMASTSMAVYPKIAHWSMYYVKERYRGHQLGRALTRRAMEMAGDRHIFGYGVAEMWAKYAEEYGMCHFLDWQLWSLLVKSADVRPERLDNDSSVVLK

SEQ ID NO: 168773 - protein, 282 aa, Heterodera glycines; identical to SEQ ID NO: 162860

SEQ ID NO: 168774 - protein, 69 aa, Heterodera glycines; identical to SEQ ID NO: 166696

SEQ ID NO: 168775 - protein, 46 aa, Heterodera glycines
GKTSHEPYDAKFTSMKYFISRKLVFPLVHQWTSAYLITLHSTFSEN

SEQ ID NO: 168776 - protein, 151 aa, Heterodera glycines
  unsure (1)..(151): unsure at all Xaa locations
MASENEIPDKFLGKFKLEKNEKFDEYLASKGVSWILRKMICFTTVTKXFEKSEAEKSKYNAYNQSSKHNTNWEGWKIGETFEGIGLDGKQHKITFDLSDNGDTLTEKHLRMDNPSDVGEVYRYSVDTDSGHLILTLSNESLTARRFFKRIQ

SEQ ID NO: 168777 - protein, 22 aa, Heterodera glycines
KGQLLLLLPHQMLTQPRLKQPN

SEQ ID NO: 168778 - protein, 163 aa, Heterodera glycines
MVRISVDVVNDAYQFINPCKQREISLRNLQIPTIENLGVTRDQFDVIDLTDNNIRKLDNLPRLKRLETLLLHNNRVDFISKEIGDQLTKLSTLVLTNNNLAQLGDIDVLASCPRLEYLSLQGNPLTHLPKYRQYVIYKLKNVRVLDYKRIRLAERQAAKKLFK

SEQ ID NO: 168779 - protein, 48 aa, Heterodera glycines; identical to SEQ ID NO: 166694

SEQ ID NO: 168780 - protein, 123 aa, Heterodera glycines
  unsure (1)..(123): unsure at all Xaa locations
MCFSREKMAPRMPLTAVGGIPKSNAIGLCLICKELSFGKHYGCISCLGCKTFFRRAVMHNQDTVCKKPGFCEFEVSARRLCRSCRFRVSTMGMSXEALQPKRDLIGRQRRRRYQAVASSVTPP

SEQ ID NO: 168781 - protein, 154 aa, Heterodera glycines
MTLEGERGGLDALLTARLDEDEQFIATINYLNDNLRLDAETTEQKLRMVLEDRELELNQQYLEQLEKMNDRVQGFVQQIRSMNSICCELTERIQTNKEKTRELLKRTAVLQTEKRELGAKNAFLDEFFAKYSLNEEEETALALPNQQGSPSDAF

SEQ ID NO: 168782 - protein, 167 aa, Heterodera glycines
AAGFRERLTHHFYAQYLDGFTFYKMTNLDNRIANADQLLTQDVDRFCEGIVELYSNLSKPFVDVLLYVSRIGASIGWQAPIQLFVYLLFSGTALTYLRRPIGRMTVMEQQLEGDYRFVNSRLIVNSEEIAFYQGNERERVSVLNAFQRMISHLRSLILFRFSIAFMD

SEQ ID NO: 168783 - protein, 244 aa, Heterodera glycines
  unsure (1)..(244): unsure at all Xaa locations
FVRHFCSQNITKPTTKCDEQENSSAPSCSSSSAALVHVQNRGQWPVEVLAKFLADCFVLGDFVSEYLXTQLLDEVWPHMNRMRWEDEHWDGQIQRYREREQMLENWLPENQALIRRIWHTSFPAPFEPSPYVHILDLHQDGFISPHLDKSRYCGRVISGLSLLSASVMRMRHKSAELGQLCVADLLLSRLSLYWLSGSARYDFTHALLGAEESRFGTQTVPRERRIALICREVVVPTAKSDQID

SEQ ID NO: 168784 - protein, 304 aa, Heterodera glycines
MSPNTLCSIVCLLLVCNFIWADDEHRSFAEELVRRLRRSHGYSVGYGGNCACSSSAYPATASHTSYTAPKQTSYSSYSCSGSGCGHQAYQPPQKTSYHWCTGTACNKAQAVAHPVPVSSNSYKSSCTTCGSSSHQQHYSTVTETKTVYPVKTYSWCTGTACGAQAQPVQPVAPAASGGGTSISTGSSCSSGTCGQQKQQVQPVAPVQPAAPASTSSCSGGSSCGAAAQEVQPAAESSSGSSSSGGYDTQETQPSGSDSSSGACSGASCGEAAQPGASSSSSCSGASCGQAAQPAASSSSSCSGG

SEQ ID NO: 168785 - protein, 94 aa, Heterodera glycines; identical to SEQ ID NO: 158271

SEQ ID NO: 168786 - protein, 224 aa, Heterodera glycines
MTLQWTVVAFILYAEIATIIVLLLPWVRPTMWKKVFNSRVVHKLKQFSNVYAYAFIFVLILLFVDATREVRKYSHVDTTREMVGRVAEADAVVHMRLFRAQRNLYLSGFSLLMALIISRIVTLLARCAHLELAAEAAMKQAEGAGKAAQTLLGKEGDVNSLSGEEAKKLRNRIGKNWERSLKKSGRRDRDAMKAQAENLQEEYERVSQQLRTAEASHNGNKKSD

SEQ ID NO: 168787 - protein, 147 aa, Heterodera glycines
GVNAGLCATTTVKTKQILNTVKKLLQEWTSSHFTDNSTDVNQLSSIDSFGLLPDAFGDFDGPNATAGQVLSKWLHIPRKDGLPTQLRCKDFNEQADFGWVNIFKEVATSDGPCHHFFRLIPIHFTVHAPSMPIMPFEFNWQLTLRFL

SEQ ID NO: 168788 - protein, 148 aa, Heterodera glycines
EWTSSHFTDNSTDLNQLSSIDSFGLLPDAFGDFDGPNATAGQVLSKWLHIPRKDGLPKQLRCKDFNEQADFGWVNIFKEVATRDGPCHHFFRLIPIHFTVHAPSMPIIPFEFNWQLTLRFLSNPRAEFLQPGGSTSWRAAATAGSSSF

SEQ ID NO: 168789 - protein, 72 aa, Heterodera glycines
VVRTRKCLSPISCGVIHPSVSPFICCFSLGLLLDSDGGRRRLFHVLLSDAEGVEVQPVQLGASDGQLTAKRL

SEQ ID NO: 168790 - protein, 123 aa, Heterodera glycines
MAEKRKLLNEIDKCYKKIDEGFEIFDDIMEKMNEANSDNQREKFQDDLKKEIKKLQRLRDQIKGWQNSSEIKDKDSLSKFRKLIEQRMEIFKDVERENKTKPHSKQGLSAEDKLDPREKEKCE

SEQ ID NO: 168791 - protein, 327 aa, Heterodera glycines
MSSLTSFDWHPTISDRLALLPVQEKPMAFAHSIASTKRIAIIKLRDDVNSVIGPSGDFCISAGPQLNFENGEKLLAKPNCTSDIDTETLFKRRVLAGYGYGNSLNALATLLEYSKKAIERDQFASDDLRFCWDWLWMQFQSADANEIKKNYGTMFAGVKHILKGTKSNSTIKQDEITYRNRIFVNEKRLKILRMCNWPNCAVRDECKARFDEIAAQNGVFGITRAAALALFSVHGMLSKEYLTHLSEFTHSREFAETWCRSPSFVTNYQRMADTVLNILQKYDGVRVPNYESVCEGLTGDDYLLAIVKFLARRDKIYNRIYNEIFES

SEQ ID NO: 168792 - protein, 168 aa, Heterodera glycines
MDRSKTNKGRRERQSLADISQEVISQILRLFPFSSSSLRVHFSPFSSSLLFRAKSTSSVQQLKKQQNIPSQSLCRAVINDNANVQIMDRIRRVASNLSLTAKGQRERRQNLALLWGRGEAKKAKNGEQKERTKEEGALSKLCKMSVDTMAITALPLDCWLKERLKNWV

SEQ ID NO: 168793 - protein, 195 aa, Heterodera glycines
MSSGIIEFAVARGLHVKCRETAVPYLRSSIRRFPVDEQRVPWNVPLVDYSPCDYTADSVHGKPWVFPSEPSRCKFNSMDDGVNRVSFHGSYNLDTDGRPLNPFGRTGLRGRGLFGRWGPNHAADAIVSRRLANGQLQFVAIERRDTGELALPGGMLNKGEPPTEAAVREFSEEAMGGHRREDKLGHFWKKGKTVY

SEQ ID NO: 168794 - protein, 98 aa, Heterodera glycines; identical to SEQ ID NO: 163171

SEQ ID NO: 168795 - protein, 176 aa, Heterodera glycines
GTPRQLSAFFGIAMAFPLLPFFFLFPLALVPLQRTAAVHPPLFNRIVPTSERTVNLTLTRDFGEAKAGNDESANNSNLTASPVEAKIHRLKELRNEMRALTAMIKEERRRSKSKDIRHRHRSIAEKMRTEISRQFRKWRKKVLSKIHLVMQRLDQLEGEMHRTKDNLQKVMHDNGR

SEQ ID NO: 168796 - protein, 154 aa, Heterodera glycines
MFYRRIFALFLCIFVILFTLQFLPVIDGMQFDVVQCGHSKRCEFGGCAPGKAQNAASCAYLFSMEPEGPDSVRMEMYTLRNVPDVKYVAVAFSDDTQMGDDAVTYCVLTGNGRVEARLSVNPANTKNNVPAPAGAENGFLELLEGKADDNGIYC

SEQ ID NO: 168797 - protein, 104 aa, Heterodera glycines
MLIETGHMYAQAARNNSEAARNNSVTAQESVRAMVNKDRLVADKELLLAQQKIELDEKDRLIATLRDTIQNKDQRIVYLEGYINGLGVPLPAPAEQQQQDGGGQ

SEQ ID NO: 168798 - protein, 154 aa, Heterodera glycines
DFSDECALRIRSGEEKPQRETHATAIPLPSAANLFLLVKKIITESTKLFADPNAVLSKLVELFRQCLRQFAHGCLSAFLPQALPGVSPGAGGIIGASTSILQNLMRDDSVVRLDADQTFFTCCVLATADWSAETTMQLQDKLRQKIADGDFGQE

SEQ ID NO: 168799 - protein, 272 aa, Heterodera glycines
  unsure (1)..(272): unsure at all Xaa locations
MPPTWALVPLLLLFFVHFIDVGFARRYKASTKYNPPAEETTTETTELTTPTECPAPVCPCECPTEETSETPPSTGGGGGTDDDIVTSPEGEETTTPVSGCVPGPPGPPGPPGPAGQKGPQGKCGDNASKRKREAAAVPKEFMTNLEPNVPVKRAKEGEAVAKTHFARGHVKGGCPPGPPGEPGXPGPPGPPGDPAPCPKHMKSEAQSVDGKQLANRNKRGETVLNAAKEGTEVKRQIVRHGIGPPGPAGPPGEAGEDGEPGPCECYKDQKSQ

SEQ ID NO: 168800 - protein, 206 aa, Heterodera glycines
IFVLLKMLSLAIRRFIVQHSNGTFMSTNFVATSSNFLLMDQENDKETKKDFRKIVKLLERSPTQKRKKEQEKAEENAKRDKREENGREEERTNWKEHISKSLHKSYDEYATRKSMESWKRRARRDTFCYMRDRNLPDLVTYTHRYIEGLTELNGKNNQRSFEDNELVVVVLKFVMNELLKGNNVQSARNERIEKTEMILIVINSEY

SEQ ID NO: 168801 - protein, 70 aa, Heterodera glycines
DCPVQSPTTNQQSTSTKLSTSPPPPPSPPSSASGRYPFGYLGQYAPLAALLNQFVQRSFHLFPARNLTEP

SEQ ID NO: 168802 - protein, 372 aa, Heterodera glycines
MPLPIRFFVLKICQQNGRNGKFVSLLTAALHRELSPPHFRRFFASTTSASSDDGFVVEKVENGNAKNYESIDGAWKCTNCAHLNWPQQRICKHCTIGIPTEAQMAILKQLLWVCPNCTARNTGDHCGNCALARCSVYKGFWVCSRCTWRNIPVNFSCRKCKKGKQTEEQRQLIQQQRWVCGECKHHNFKEECFSCGAPESKRLPDGVGGESLPDGSWYCVGCGFLNFPNYSKCRHCRREEPTDEQLGVIHSSRWQCAECHFDNYESNLTCHHCDAPRPTEGQLPATSDCQYWVCSSCLWRNFPTHLSCQKCIKGRAPEENRQQIQQLRWVCGICRHHNFKEDCFKCGAPKSKGFSCGIGGESLDDGSWYCVS

SEQ ID NO: 168803 - protein, 204 aa, Heterodera glycines
MMKSSADAEQFGRLSFSINSLFSTQEVASSSSASDPTTQLIISSLNSVRKTNEGTVENATKKTDNKELSTDEDEQQNVASTSTPEDGEFSKISRIRKRRYSQARIQPTRVKKVMQSDEDIGRMVASVPVAIGSAMEVFAEKLLLAAAESVQHSSTKTLSPMHIKMAVSRVPQFSFLEPMLRDVPMNPKMAPSFGQQSSSTSNGE

SEQ ID NO: 168804 - protein, 384 aa, Heterodera glycines; identical to SEQ ID NO: 162746

SEQ ID NO: 168805 - protein, 148 aa, Heterodera glycines; identical to SEQ ID NO: 162278

SEQ ID NO: 168806 - protein, 155 aa, Heterodera glycines
FPTHSLRSEMPTTVVRTTTTRTTGGGVHHHSIRMVPIWSIKLITAVLALLMLILIFFLHTAIWQYYVVTFIVLVLTCGFLLGWALPPVLNRFLTFYRSDQISYSIIAGLTILSLILCAAYLIHNDYYKHGDNYKIMVGVTICMTVETLMCCVLLS

SEQ ID NO: 168807 - protein, 114 aa, Heterodera glycines; identical to SEQ ID NO: 164063

SEQ ID NO: 168808 - protein, 160 aa, Heterodera glycines
KQNKKSEVVAANEKKQIKKSEVDFPVVLKRGVQGRVKWYSPEDAYGFIHRYDVDEDIFVHGSSIVRFNIRNKNQHPVLSIQQEVEFDVIKVRKGLEARCVSGPGGRLVGRFFNIPRRSVSGAKNQKHAVNGGLRSIRRRSDGEAIREGEGTRGLQQKGSG

SEQ ID NO: 168809 - protein, 136 aa, Heterodera glycines; identical to SEQ ID NO: 143562

SEQ ID NO: 168810 - protein, 195 aa, Heterodera glycines
MSQSPQMATFSGLTANIYHEKQKRQLCLLHTLNNLFQREEFVRDELDEICERLDDSKWFNTHRSWLGLGNYDANILLCALKTRGLVGRWFDKRMPASWIRKEVIVAYIFNIPSTGFMPLPFLNGRHWFTIKQFGPTYYNLDSKLAAPTLISTANGIVHYINSLLAQGNELLLVVRPENEANCLLANGEAEHGGGE

SEQ ID NO: 168811 - protein, 216 aa, Heterodera glycines
MVKTLWIVRHAEREDNINSNWQKNANPQKLKSDNSPLSSRGIKQATELAERFSNVQIDHIFASPFERTVQTATFLISQRKIPIKVEPGLAEALYLCESPPGFEESAELRRRFPLVDSEYRSIYEKPMPREGFGDESCIQRIRQTLEEILRRYNEATSIVFVSHGSPIGALHEVLVGDWNYVGQATVSKFVETGDGTGKFRQEFTSDSSHLSDKENL

SEQ ID NO: 168812 - protein, 197 aa, Heterodera glycines
  unsure (1)..(197): unsure at all Xaa locations
MRVVPIPANTDNYMYLIIDDDDKYQKGHRPAALVDPVNVEKCFEVVKTEGTLLEAALVTHHHWDHAGGTYQLAIKSRSGFSDLLMKQPLCIISGDAERVERTEKVIADGESVQLGTNLSVTAMYTPCHTSTHVCYYVVDQRTNERAVFTGDTLFIGGCGRFFXEGTAEQMHHALNEXLAALPDETLVYCGHEYTVAN

SEQ ID NO: 168813 - protein, 106 aa, Heterodera glycines; identical to SEQ ID NO: 162945

SEQ ID NO: 168814 - protein, 244 aa, Heterodera glycines; identical to SEQ ID NO: 163546

SEQ ID NO: 168815 - protein, 170 aa, Heterodera glycines
MPQNEHIELHRKRHGRKLDHEERTRKKLARAVHDRSKVAKKLRKGKAKLYHKKRYAEKVQMRKLIKQHEEKKQKGTTDTQTEGAVPAYLLDRQKETAGKALSTAIKQKRKEKAAKYQVPLPKVRAVSDAEAFKVVNTGKTRRKGWKRMVTKVTFVGETFTRKPAKFERFI

SEQ ID NO: 168816 - protein, 167 aa, Heterodera glycines
PIVHLLSVHYHIPTTIQSISWPVALSGRDLISIAKTGSGKTLGFILPAIVHTMAQPPRRPNDGPGVLVLLPTRELAVQVEQVAREYCKLMKLDVTCCYGGAPKAGQANDLRRGVDICVATPGRILDFMEANTTNMRRCTFLVLDEADRMLDMGFEPQIRKIVGQIRP

SEQ ID NO: 168817 - protein, 139 aa, Heterodera glycines; identical to SEQ ID NO: 163146

SEQ ID NO: 168818 - protein, 158 aa, Heterodera glycines
  unsure (1)..(158): unsure at all Xaa locations
MFGAKPNQHWLVRVALLDAVTFLAPAIHDDDLERFVQIDIDDVFIGAIGSRMVADDVDYLSILQGKLREHIADFHFTLGFSGNFFRHGDPAEIQGDEILAMRTNSTXFPHMWRHNHPPEFSADYLLALMTQNRVFAENVGISANLSYAVSPQHSGVYP

SEQ ID NO: 168819 - protein, 140 aa, Heterodera glycines
MSGGIYGGDDVGALVFDPGSHSFRVGYGGEEFPRFDIPARVGVCPRPSAGTDASQTADATIEEVASGRGANASNKFDHYIGTTKLNVPRAGMEVKPYMREGMVEDWELFEKMLDYIYGPCLGAESREHGVLFTEPPWNPK

SEQ ID NO: 168820 - protein, 197 aa, Heterodera glycines
RPICDAKTGNYQPQQCRDEKHCFCVNYLTGVRQNKKEVPTNEILHCEGGQVDFSIDDSHIIKSEKGEGEKGDEELIPIGSPVCKKPRDAGHRCHGRAGGPIAAKNLKWYFDTETFECLAFSYNGCGGNGNHFDSPADCWDKCKLVDLAGCAGMRLPATDKQGHTIICAGAGYPSPTAACPSGYRCTMLAHMGVCCHS

SEQ ID NO: 168821 - protein, 71 aa, Heterodera glycines; identical to SEQ ID NO: 166678

SEQ ID NO: 168822 - protein, 172 aa, Heterodera glycines
MNQQKSAKRATRGQRQIYEENKQTLLCYVLASICSSVLVFSLNYFLFLPQKGAWIGLALSSASQAFSVILMSMMMKTVRNERNQLVDAGLDLNDPNAFGEYCKDIVILSVSAQLLSLIWTGFFFVLLSIPFFTLYKLWTNILGPWFFRPTLDDDEKEDKKKQKKPKFVHVRR

SEQ ID NO: 168823 - protein, 146 aa, Heterodera glycines
MTSTSPPLTNGVANHLSENGSATSPELIVFGSIVQDLVSYVDRFPKPGESVRGHTFKTFCGGKGANQAVMASRMGTRVTMVGMVGDDLFAAENVRSIAQNGVDVSLVKQLSGQTTGTATITVSGDGENCIVVTLGANTSLGAECAL

SEQ ID NO: 168824 - protein, 201 aa, Heterodera glycines
MTKPQQVLVLDPNNELSFKGPFTEYVNANLTLSNPSRKDVYFKVKTTAPKFYCVRPNSGVIKANDKTQINVMLQPVESPETLESERSRHKFMIQTAFAPDDEQLPVDQFWKTVDPTLVMDSKLRVVFQRPFGFGDENNRDETNATGPFFNFNKTGEPKNEQPTQTPKSTEANSGDIQLALQREVELRMMYQDENKNLEKEN

SEQ ID NO: 168825 - protein, 195 aa, Heterodera glycines; identical to SEQ ID NO: 162806

SEQ ID NO: 168826 - protein, 163 aa, Heterodera glycines
PFRFVLSIRIGAALPHSFCSFSDAFPSSGDRILIRRENFNRNRPRLLKRNEKSLLAENRQGIPTATDCATLVLFCQLGSPSAEESWVLFTQRAKRMKHHANEISFPGGRIEQGESVETAAIREAEEEIGLDRNDVELWGTLRPLFFGEAGVVTPVVATIGQNV

SEQ ID NO: 168827 - protein, 154 aa, Heterodera glycines
VAPSAMRQQHGPGQKRVSRVPIIIIPAGASSLITIYNAQEILQDLRYVSTEEKKQFSSKRENELLLQIPKNGVTVPYRVVDNPTRLKDEEWDRVVAVFVQGPAWQFKNWKWNGNPVEIFANIAAFHLQFDELPTDPNVKKWSVHVLKLSCTKRH

SEQ ID NO: 168828 - protein, 177 aa, Heterodera glycines
MRLNVLLAILAPLLLLIATATLCGATGKEAAANKIGVAAVALSEADNSTTPAPPPPPSPGGSDDKKKDDDDIKPDEDPAKKGQRNGHGRRRQKNGRSGRSIWRGVHFCCHSFRHGFDVRTDQNVCPLGEAARVGTHRTIRCIEKTWKALGQNKQRFPYFICCCFLHHFYHFSLKFLL

SEQ ID NO: 168829 - protein, 222 aa, Heterodera glycines
MASKIKPLICPSILNTDLSDLANECRKLMAAGADYLHLDIMDGHFVPNLTFGHPLIECLRNKLGNDAKLDVHMMVSNPSKWLDPLHKAGIDQFTFHWEALGEDEAVDTLIDRVKSKGIRCGLSIKPMTPLDKLMKFCEKIDTALIMTVEPGFGGQKFMQDQMEKVRQLRKAYPNLDIQVDGGVGLDNIEHCANAGANMIVSGTGIVRSADPRQTMPKMKETV

SEQ ID NO: 168830 - protein, 183 aa, Heterodera glycines
MKLPISSNKFNKYELYKFRHATMAIVENIGFSTSNSSAVSSLSFLLRTYFEQLCRDSLNSAINSGRAEVGLEDVSYVFGANGINITELHDYIQQVQPYAADEHPLFPVTEPLNVPPPSSEIADTSEQKNGERESAGNDGAEVDEEGNREQNNKHSLNSFNSRSVISMIFKMINIFQKVQCSKC

SEQ ID NO: 168831 - protein, 76 aa, Heterodera glycines
GIRNLQFRIFNRFFHLNAQFTPFLNPLEEQALMYQYADTLAVRAFLMMADLSFVLEQRPNAEFMSPTGEVPFLRLQ

SEQ ID NO: 168832 - protein, 184 aa, Heterodera glycines
MFKKFDSAEDVVGSQQLKGSVQKSIRAKLVEQYPSIEPYMDAILPKKENFKLVKCKDHLELIADANGTVHFVKSRDLANYFPTLRLLHKYPFMLPHQQVDKGAIKFVLNGSHIMCPGLTSAGGRLLDDCNEGALVAIMAEGKQHAMGIGQMKLSSANVRSQNVGIAIDNVHFMNDGLWRLTTVQ

SEQ ID NO: 168833 - protein, 165 aa, Heterodera glycines; identical to SEQ ID NO: 163782

SEQ ID NO: 168834 - protein, 247 aa, Heterodera glycines; identical to SEQ ID NO: 163963

SEQ ID NO: 168835 - protein, 252 aa, Heterodera glycines
MSVGVLFRLTIRPSPAGLRLTCFLATNYHHNLHQFNNNCLVRRHFSCTSRLLLATTTDNKGDAASAKQQQFAKIELKPKTGSDGAVAEPERTYLEEMLIERDAEPKTAGQKVKRAVETTFYISFGLISCAVLGVMTYLVFKEFFAFNTPQGVYRDAVKRVKADERCREMFGKRIMTFGEESGRGRRRHILHNKYVKDGQERLSVMFHVKGDAGIGKTYAEIYKGEDGKWDYRFVLVESDGFPKKAIFLIDNR

SEQ ID NO: 168836 - protein, 158 aa, Heterodera glycines
STPILKSVRSSGGGSPCSTNLSVAEGSKNGGGSSGSANAQQGTNGSGNNLFIALFDYNARTDDDLNFKKGEALEILNDFQGDWWYAKSLISGKCGFIPSNYVARESSIDAQPWYFGKLRRIDAEKLLMLGVNEHGAFLVRDSESRHNEFSLSVRDGEV

SEQ ID NO: 168837 - protein, 220 aa, Heterodera glycines; identical to SEQ ID NO: 163535

SEQ ID NO: 168838 - protein, 144 aa, Heterodera glycines
MGKVSKTKSAKKSAGGSGNKTVIWAVEDIVDGPKYETIGTKRQKLYKVRWGETYELASNIPPGLIDLYEKREKKQIKILGPLVTSESSTSEGSLSPKERIPLHQTKFAIEIGGKVKCLSYSEVRNTYKEELLQYFEERAKIDEE

SEQ ID NO: 168839 - protein, 185 aa, Heterodera glycines
MDRLEFRDFPSSGGGASSEFFNSDSVNNKPPPDPAFPSGNLLDVSSSSESQRDDSSKVHFLSLSFYRRFFDIDEEQVFARLLNSAMPRRTGNFISDFVQPNPDLRGPFWVSVSLVFSIAIVGNLSRFLHTFGSDELFISDFSFVTGATSLVFGYVLTMPSLVYAFLWYHRPLNLQYSFLQFAVCL

SEQ ID NO: 168840 - protein, 127 aa, Heterodera glycines; identical to SEQ ID NO: 162396

SEQ ID NO: 168841 - protein, 115 aa, Heterodera glycines; identical to SEQ ID NO: 164043

SEQ ID NO: 168842 - protein, 184 aa, Heterodera glycines; identical to SEQ ID NO: 161532

SEQ ID NO: 168843 - protein, 118 aa, Heterodera glycines; identical to SEQ ID NO: 163719

SEQ ID NO: 168844 - protein, 50 aa, Heterodera glycines; identical to SEQ ID NO: 154146

SEQ ID NO: 168845 - protein, 276 aa, Heterodera glycines
MLSETVKIGFIGAGKMAQALARGLINSGRYPAENLMASCPKTDESLLEQCKKLGIGTTSDNTRIARENDVIILAVKPMNISKVTSEIAPNFRREHLLISIALGITLRYIEQLLPSKSRVVRVMPNTPAVVGAGASAYSMGSACQDGDSKVVQDLFSTVGYSVEVPEIHLDPITGLSGSGPSYGFSMIEGLADGGVKMGLPRELSLKLAAMSLYGAAKMFLETGEHPGVLKEAVQSPGGSTSVEIPELEKGGMRGLLINAVEAASERSRRTGEAALP

SEQ ID NO: 168846 - protein, 171 aa, Heterodera glycines
MNSAEMASPSIDIGLLVLRGNEELIRQKLKRLLAITMPKVRQKLYVHLEQMDVIRALLPAIYINAASIAPKIDLRVLLNRTTSVPVDRVFYDEVKDPSHPIFPMLREENGPTFKMDSFATSHHKLPEKPYDHVVLGGTFDRLHNGHKLLLSEAAMMARTRITCGVTDGKMN

SEQ ID NO: 168847 - protein, 151 aa, Heterodera glycines
MAPKGKKIAAAPFKTAAKAGAVKDPRFEKATRNFGIGNAVQPKRDLTRYTKWPEYVRLQRQRAILKRRLKVPPAINQFSRVVDKNVASQLFKLLNKIRPETKQEKKQRLKAIAEAKAAGKTVEAGKKPVVVKYGINHVTALIEAKKAKLVV

SEQ ID NO: 168848 - protein, 288 aa, Heterodera glycines
MVNFFVIFVPFLLLIVSNQLKAEETEENRHKTEETWNYEEPEEWGGKCQKGDRQSPIDIHKQWFIDYKIPAISFANYEKNGTVTMKNNGHTVVVSGFDTWEKQPNIADGGFGSKYMLSQFHFHWSQNENGSEHTVDGEHYDAELHLVHVKEGLSLSEALALSDGVAVLGIFFKRAYVGSALLALQNGLSQVTNKDDSVTIEHYEPNDLLPTASEVFFRYNGSLTTPDCNEAVIWTVFAVPKSISREQIQLLRAINGHDGKPISSNIRPVQKFSRKVQKFGYNKVSILP

SEQ ID NO: 168849 - protein, 155 aa, Heterodera glycines
MDFGPRDDEGKPCKACFSFEDMLRMMGKKKTADRRNGEAQNKTAGDEPSTSSSPSADRRRTDCPLDKDELGRSTWNLMHSMSVYYPKEPTEQQKTAMGQTIDGISKTYPCDHCAADFRADLRAHPPLLNSRDAFARWMCEAHNRVNVKLGKERFD

SEQ ID NO: 168850 - protein, 55 aa, Heterodera glycines
IADFRLCFDRTIILTGLTWPRKIAQKWWTSWLQLLFATICQRMPFYWLLGCAMCL

SEQ ID NO: 168851 - protein, 210 aa, Heterodera glycines
SSCPSGHQQQMNACQKLKRPTPPITTYSSVGPERDCPLRKDRAEPNWTETDEAICDDSDLIGIMQRQYVNLPHSTQKAARRTNAVRQRMVADATESSDCSSDVTTPNGAIMEELASLATEGDGAAMARENGSEKSTSSSRTGVDSLSALLNRRVSPPHHHSLSPSAALSGGAASIQLRRATCGELDKSKRGELGHSIFYVDEPDSPSADG

SEQ ID NO: 168852 - protein, 245 aa, Heterodera glycines
MRRFKSSGLYRRFGMIHRRSGVHSGPAFLVWHREFLKRLELVFRALHPENSEPILGLPYWDSTLDHDLPSPEDSVMFSEYLLGEPDEAGFVTNGLFANWTTMDGRHSFQRMFGDQDDGEFINDARIDWVMTQDIVESVMAFTLPTQNCINYEVDDRFLEYSHDYVHYFISGDMQERFSSSNDPIFFMHHGFIDSIWEHWRQNKQSRLQRETDFPRNDAACAPRWHFSEEFMPMLQPLWNIDVLSN

SEQ ID NO: 168853 - protein, 245 aa, Heterodera glycines
MSSSSGHPQTSSASAIRALQMELRSLQSQPLEGFTVTCDDDNMFKWTVGIFGPPGTLYQGGYFKAHLKFPTNYPYSPPTMRFIHPVWHPNVYENGDICISILHPPVDDPHSGEMPSERWNPTQSVRTVLLSVISLLNEPNTSSPANVDASVMYRKYKDHGEPEYATIIRKQVEKSKEEAKKDGIKVPETIDEYVVKAKPRVQGNESNDVIELDEDYYDYEDDDTDEDAEYGGEEEQDSGQGDDES

SEQ ID NO: 168854 - protein, 152 aa, Heterodera glycines
VQLRFILLFCFFLHIFHVMCFSTKKKMTSFLAKTKTMFANSFDCFSASEIGAFEAEHCCACGTTHLWADKFWKVACSVDSEKLAFRGQATTAIGAAYWHPMFFTETRRSRSAVQAHLKCASCGKEVNKVYEGTDDAGGGSRSAFGHYTDTEK

SEQ ID NO: 168855 - protein, 237 aa, Heterodera glycines; identical to SEQ ID NO: 162433

SEQ ID NO: 168856 - protein, 175 aa, Heterodera glycines
TSGSPGCRNSARGTLHPSKLNQKKSEKVLVSSVRMDRLSWYQTGESMEEILCQAGSVGIYDGDLKQTSFEQGTASLTYQRIIWADSTDPDCRLVLHHSMVHKIEKQHKTMFGRGGKIIVTVKPVTPGHAQGPIAASGTNSLRFVFRNGGEEEFYKRFLDALNKQMWQRTSSTSSS

SEQ ID NO: 168857 - protein, 134 aa, Heterodera glycines
ISLPSKLNQKKSEKVVVSSVRMDRLSWYQTGESMEEILCQAGSVGIYDGDLKQSSFEQGTASLTYQRIIWADSTDPDCRLVLHHSMVHKIEKQHKTMFGRGGKIIVTVKPVTPGHAQGPIAASGTNSLRFVFRN

SEQ ID NO: 168858 - protein, 128 aa, Heterodera glycines
IRRYSMCHRSQAATDYGISSCCCSYCSTCNCCSITAVPLPTTAQPVVAAVTVTVSSHHRVLPYHRPSMIRMLLLALLMVYCCYCHTVQCSPSTVWNTVSGAEDNIDTVVAAANNGGGATFLVPQQQLL

SEQ ID NO: 168859 - protein, 231 aa, Heterodera glycines
MHGRQQQLRMRKEIYRYTCEEPLYAAAWSNKLYPDKRFRLVVGTLLLDEEGISSNKMYIIELDENVGELVKRFGILHGYPCTATQFIPNTDVSQPELFATTSNCLRIFRYHPSSASISQECELSATKSSAYSSPLTNLDWNEVDPSLVATCSIDTTCTVWNIETNQPIGQAPSIKGLQKTQLIAHEKPVHDIAFTRLDNGRDQFATAGADGSIRLFDLRALQHSTILYEDA

SEQ ID NO: 168860 - protein, 357 aa, Heterodera glycines
DKGHRKAELANAQRIAELEQQLVTQKGMEKQKIAQAVEEQRKLDESLSKMALEIERRRNREMTTGATQTDHLVGSTRNESDEAELDAQLKRAALAHAEHLERVIRTQKQIHDMETQQIVQETIAIERDKFGKQIENGLVKLAAIEEMLKSRATKDLENRRAKIYWTICHSLTDALANGGTAQSQKTTYYKTQLLEQIAVLKKLVQNDAFAQSVCAHFPSDDAIGRGVPTEQGLVKRFDGVYKLARCTAQIGDEGGTLWRYITSWLQSLFTFELPYAYSADDRLDLNRYDPYELLARCRHFVQQRDLLNAVRVDNLIRGKSARIFSDWLKDAKFHLEVRLLVELLLAHSQASGIRTTY

SEQ ID NO: 168861 - protein, 149 aa, Heterodera glycines
MAFQQHLVNKFSPLLISVFSPLRNCANFAATTQKAAHSPLPFSLKTMDEFDEDAAMAQRPMPKWKKAGLRIERNCAENQIFLSIVQEIVDKFGWDNSAHDYDMWKKAFGPNFSMFFVLDQNRVPMGCISMSLYPQVAHWSMFYVKDPYH

SEQ ID NO: 168862 - protein, 203 aa, Heterodera glycines
  unsure (1)..(203): unsure at all Xaa locations
MGFSTKPIIIDGKDHLLGRLAAVTSKQLLLGQKIVIVRCESINISGNFHRSKLKFLAFLRKRCNVKPSRGPFHYRAPSRIFWRTVRGMLPHKTARGMEALKKLKCFDGCPAXYDTKKKFVLPNSLRHIALKPRRKYCTVGRLAHEVGWQYQGVVEKLETKRKVRGAAFHEKKKAVLKLKRKAVENAKPKTALFDKILEQYGHA

SEQ ID NO: 168863 - protein, 192 aa, Heterodera glycines
MATQNGAAMATDLLQRKAFKIGIIGGTGLEDPHIMERSGEVRVETPYGRPSDALIEGNVAGVPCVLLSRHGRRHQQSPTNINYRANIWALKKAGVNVIVAACACGSLREELEPGKLVLIDSFIDRTTKREQTFYDGLPGHPPGICHMPMHPALNERLRRALLATATRLGAAHSDRGVLVCVEGPRFSTRAES

SEQ ID NO: 168864 - protein, 158 aa, Heterodera glycines
NPSVNKIHFSKDELDKILRDADEQRDFPALLRSLGQLAFRPTDGFSLPSSALSQMASHFASLSPFSAFHWANGLFALLPSAENHANSEVLIVSLLRSLVDNVPLLNANKLRAFVKTEISRQCVSFWQIGKAHLASALTLCVLRILLMELSYLEAIQNG

SEQ ID NO: 168865 - protein, 270 aa, Heterodera glycines
  unsure (1)..(270): unsure at all Xaa locations
MVERRKESPKRRRRSSSSSSSGSSSSTGSSSSGSSSSSSTTASRSPSPKKQRAAARPSARDDRTTRRSPRRSRSPHRVQPKTEKSTVSSRRSPSPRRRRPSPPSRGPRRRSRSPRHERAAPSPPPVKRERTPEPPPRRLCVRNLSRNITKAHMEEIFALFGALKSCELPMDRVHVHLXRGYGYVEYEKAEDAXEKALKHMDGGQIDGLEIQCEMTFPFKGTGGGRGHSPVGINSMGIGIKRERSRSPARRFAARLSPPRRGRRSRSPTPM

SEQ ID NO: 168866 - protein, 120 aa, Heterodera glycines; identical to SEQ ID NO: 163519

SEQ ID NO: 168867 - protein, 119 aa, Heterodera glycines
MQHARCPYVKENAPLPTNIKEALPKDVSVKIQQIHDDGSLSAEQKMERIDSIICTLPENVIDQIPDPPEVAQLPADVRQRVKQIERQQGKSFSTKFEEIMKYVDTLPEGTKSAAKNIFH

SEQ ID NO: 168868 - protein, 160 aa, Heterodera glycines; identical to SEQ ID NO: 163285

SEQ ID NO: 168869 - protein, 208 aa, Heterodera glycines
MPNIRQQKKHEMVDSDDERNEYGSTKAEPSPLTDQSATSMMTHNSSNAAEGGHIISSNGGAQICGGNGTVPMPLISCWSPCSASSAGDPLLWYETDKCQYCNQKCRKPRRLLDCLHYVCEECVPEQCLLLDNLEPDEIRCPNCSQVEMSSISGQSTESSRVEICIKHKENFTRVCLSCARLLCVNCEQQLSLPTAQVNNITNVVAVPQ

SEQ ID NO: 168870 - protein, 48 aa, Heterodera glycines
HEEQIEVDEKIFRWQMNEDAMADEKLADGIRRFAVDAIKLEELIRSNL

SEQ ID NO: 168871 - protein, 162 aa, Heterodera glycines
  unsure (1)..(162): unsure at all Xaa locations
MSFLLFVTIAFANLAPNAFGQQWPKATSDETVPATIVVTGGSRDFGYKRLTASSALGTGDQXEGQKALIRAEKGAVIKNLIIGQNGADGIHCYDGCTLQNVWWEKVGEDAATFRSSSGCKEYNFLVTGGGVKNAKDKVFQMNGGGTLTIKDFVAENIGKLAR

SEQ ID NO: 168872 - protein, 173 aa, Heterodera glycines
MHSFLVLTILFANLASNAFGQQWPKATSEETVKATIKVSGGVKDFGFKRLTASSALGSGDQSEGQKALIRAEKGAVIKNLIIGQNGADGIHCYDGCTLQNVWWEKVGEDAATFRSSSGCKEYSFTVTGGGVKNAKDKVFQMNGGGTLTIKDFVAESIGKLARSCGNCKTQCQK

SEQ ID NO: 168873 - protein, 253 aa, Heterodera glycines
MSFLLFVTIAFANLAPNAFGQQWPKATSDETVSATIKVSGGTKDFGYKRLTASSALGTGDQSEGQKALIRAEKGAVIKNLIIGQNGADGIHCYDGCTLQNVWWEKVGEDAATFRSSSGCKEYNFLVTGGGVKNAADKVFQMNGGGTLTVKDFVAENIGKLVRSCGNCKSQCQKRKFVVENVKVTGLKTLLCGLNEIYGDVATIKNVQVSGPSKKVCAEFEGNDKQKEPPMLRSFDVGSSGDGKNCIISSTTSG

SEQ ID NO: 168874 - protein, 74 aa, Heterodera glycines; identical to SEQ ID NO: 162378

SEQ ID NO: 168875 - protein, 159 aa, Heterodera glycines
MAKSTEEERIANVHFDLEVVNSDFIRPMRMNFRRRGRDLYWDMALGHDSVAALIFHTERKQLLFVKQFRPPVFVNVVRSLPENKNKSLAEVRWENYPIENGCTVELCAGLMDEPGKTPLEHMKKEILEECGYRVDESNIRPIRRYVTGISLSGAIQHLF

SEQ ID NO: 168876 - protein, 144 aa, Heterodera glycines
MASGERQKLVNNSTAERPIPSQHFSVHSNGYGAIAADATRPSVSGSSNSSSDGFHCHADGDRRPTDAQNGASDQRRARTVLWMSVGVCFVFMICEVIGGVLANSLAIITDAAHLLTDLASMLISLFSLYIASRPASQRMSFGWH

SEQ ID NO: 168877 - protein, 154 aa, Heterodera glycines
  unsure (1)..(154): unsure at all Xaa locations
KTKISFAIMANPSKNIAMLREARSSPYIGGGGSVGTLPPDALPASGPMHTRLQRNRRPDSATAPNTARLQNAASAEHFEQLKELIQFSAGSSSSTSLIAAGRHFGTEQSIENYGRLKAESVXQFVGGQRHLSDQQHRSVHFGKSRINHFNDSHR

SEQ ID NO: 168878 - protein, 132 aa, Heterodera glycines
AVGTPRLPCKIMVRGRGSLRDAAKEEMNRGKPNWEHLEDDLHILIQCEDNEKRARSKLDKAVDKVKKLLVPSRDGIDELKRKQLMELSIINGTYRANIGPKNSPTVPRLTPLSMLSPVHSPLSPPHRVHSTV

SEQ ID NO: 168879 - protein, 156 aa, Heterodera glycines
  unsure (1)..(156): unsure at all Xaa locations
MQQIPILSLSNFLPIFSLISVPFLLSFPSTAFGCSCAPTKFNESMCVAKWVSHVKVLQNTTTTNSHRIFTVRHLEVFKSPNGTAHNDQLIGKESAVWTPIFTAACGVRELDTEKEYLLAGTVDNLGTMQINLCLFIPIEDGQPNAENGIVEWAXVP

SEQ ID NO: 168880 - protein, 275 aa, Heterodera glycines
LKAIHTALLDEVISSGGDEINGDRFAALRKFVELLIQRFPKKTFERNPQLSAHPKGTALSSIGKPLLRSQRAFKVFEQMKRFLDAKAGDGKVSMDEWRAEFDQAKKQNGDPFPVTAEWEHCKGTRTIFRGFTCGLWTAFHAMTVQAYLGQEQQPLKPLKAIQGWVANFFSCSGCRRHFMAMTTEKFPMEAKNVNKPEDVVLYLWKAHNIVNKRLHGDEATEDPQFIKEQFPPQYLCPGCHKTPSSASDGNDPTELDPEKTLRFLLQYSTNIKPRP

SEQ ID NO: 168881 - protein, 133 aa, Heterodera glycines
RIMHERVQQDFRSSKFSTRANQNGQHGNRSREVRFDNTNGRAYTRRNGSYSSEPSSGRRSSFSRHQDGARTYVPSTAVQRPISPNGCDSGGMFLMVDPFNIPNTLGAQIQVFDLQENIRHIIGYCIPLRCCVG

SEQ ID NO: 168882 - protein, 155 aa, Heterodera glycines
MNSFIFRRLPSLRFPTASMNFRKMFSTAASSSQQFNVEKPVINKSDIMEPEDYDLTDRRKWVIENISNSIGDLTKMIFAVIYIQGKQHKVTQDDIIHVEHNIPLDVGEEIALEKVLMIGNDEFTLIGRPLLDPKFVHVRATVIEKTTTSPEVQYD

SEQ ID NO: 168883 - protein, 135 aa, Heterodera glycines; identical to SEQ ID NO: 163767

SEQ ID NO: 168884 - protein, 73 aa, Heterodera glycines; identical to SEQ ID NO: 162438

SEQ ID NO: 168885 - protein, 102 aa, Heterodera glycines; identical to SEQ ID NO: 162191

SEQ ID NO: 168886 - protein, 385 aa, Heterodera glycines
LSRVSLVAIRAAMSAIEGETCGVLGRLQFEVHAIVGFARLCAGDVFEVSVRHGHQRWRSRGKTLADKSQRWEQRMSTMDVLWNEPVVVKVLEVKFLKSRCLNERQFDPAKFALAQPQLVTMNLNSAGSIKLRLVVTWLPLLATKTIGENSLNNCQKGNLTEREKQRTDHRTNGSKQNARLTQNEQKKRDEEERGREMQQQNTETKEEDQCQNESADGAAVKVCLRDKKRQREQRIQLGNSVSTGSNFGIGKEKWRCSSTTLLDDVYKDLAKSIPTIDDLTVLHPSHFASLPSSSPRHRSFDSESDRAKTEAKNPRRIFSFIKRGQSEASADQQKKDWRKSASLGEIALAKDECFTTTNAEKASPVSTEKNGNGAKRGKPSSVKKG

SEQ ID NO: 168887 - protein, 187 aa, Heterodera glycines; identical to SEQ ID NO: 163511

SEQ ID NO: 168888 - protein, 160 aa, Heterodera glycines
GLAKMVSAIAQYFLAFLLSASVIAFFSFLLLTALSIFKPWTKRNKSHFVAPRFHFRPEEEEEANAQFPCLLTREETSWKGLQHSEPELYLSVIVPAKNEEKRLPRMLDECLKYLEKRAAKDSEFTYEVIVVDDGSTDGTADVAFSYARSHPLFILRLPKN

SEQ ID NO: 168889 - protein, 187 aa, Heterodera glycines
MPISSNSATAGTSAMSFDYAENRFLLCGNARGNVSVVDFESFSNSLSNAEVYPRHYVVINTNRKSHHEFMVNGCQWYPVDSSIFATSGRDKLLKIWDADQLKSVEKFAFEQPISSFHWFVPCDCNSSLIPIATSSSNVVLLDPRLGNTAQQIRCLQQRIWSVRWDRFRDYVLVTGSDSGEIALWDIR

SEQ ID NO: 168890 - protein, 104 aa, Heterodera glycines; identical to SEQ ID NO: 163361

SEQ ID NO: 168891 - protein, 60 aa, Heterodera glycines; identical to SEQ ID NO: 153246

SEQ ID NO: 168892 - protein, 80 aa, Heterodera glycines
PAPPSDSIVNANGPQLNNQQTDTGLVNIVPLAWQPPKFTNGGIQGQSESNPMLFGGGFSFTTTVPPAANGPFQFGAAPPV

SEQ ID NO: 168893 - protein, 209 aa, Heterodera glycines
  unsure (1)..(209): unsure at all Xaa locations
MGLPIIQIYMIVARQLSKPITGYFMGLGKEHPAFRNRVLIPIGKTITNWXTKLRMKNLDLGSPTSVVNVSEETALEQASEVIHQVAIFGYTVVVFYAYSYFTHKEEKELASAEELRELSKKTSQEIMRLNVLVTELQDEMRMPRRDRNWTFPWSGESKSALRESAVVNPMLPSVVMTDSQPKEQKKDMTKSISRTEALNRLTNATETSS

SEQ ID NO: 168894 - protein, 232 aa, Heterodera glycines; identical to SEQ ID NO: 163507

SEQ ID NO: 168895 - protein, 152 aa, Heterodera glycines
MNSKMHRSFFHWTSLLMQGGILCAPIIVNLQRNKLNHDFKLRKMMSADLPNMPDENLLDLVEAEMLAKSNDRLYPFEKHHFGIKVKDDIESNTYGFFYCQNGVTFRFSSRLALNDVETIRRHYPNFLGLFKENLKSKWAKDLESVKENLRSA

SEQ ID NO: 168896 - protein, 129 aa, Heterodera glycines; identical to SEQ ID NO: 163892

SEQ ID NO: 168897 - protein, 490 aa, Heterodera glycines
  unsure (1)..(490): unsure at all Xaa locations
MDGAESVILQCATEKGNGVGPSVAADCEANKLAEVTEGLARITATAEGGETFYNRVQEFNRDLTSLXVVVLRAFAAEIPNEKEPKTEEEGPKAKQRKMDEGKAPEANAAQSQPRAFSVLDALSASGLRAIRFALEVPNVTRVVANDFSEKAFEAIRRNVQLNGVQDKVEAVFSDAIDLMMAHRKFGKRFHAVDLDPYGSASAFLDAAVQAVMDGGLLMVTCTDTAILCGNTPEACFNKYGSVPLRHKSCHELALRILLRAIDAHANRHKRYIVPLLSVSVDFYVRCFVRIRSGAAMAKDSVTKLANVNCCATCQSLDFQPLLKKSVSGPSVRFSTAHFQSELVRLFLGQSDASMDGRMVAKCAHCGGTAIHTGGPIWVAPTWDTEFVGKLLAILKGPNAGQLRLGTRERLEGLLTVLSEELPDVPLFYEHDQLMVVMKCPSPKMNVFRSALLNAGFRCSISHCNPRAVKTDAPTSFLWDVCREWAKRNGI

SEQ ID NO: 168898 - protein, 156 aa, Heterodera glycines; identical to SEQ ID NO: 163505

SEQ ID NO: 168899 - protein, 82 aa, Heterodera glycines; identical to SEQ ID NO: 163504

SEQ ID NO: 168900 - protein, 53 aa, Heterodera glycines; identical to SEQ ID NO: 163461

SEQ ID NO: 168901 - protein, 220 aa, Heterodera glycines
RRLPLVPRIAPFSPIQRFEKQFPKIYYAPEWRLDESGKRMTRGVEEKYSPMNNYGVTPDKWEYMNKVVWPPNYVVPETGKPKPREVFHCIENIHTAPKKMHTVHQFALNMVVDEAIQQLRNHQKKPTFLLADLIEEAKERARKEFFIENPGKMFVAETFHIQSKIVKGARRHAHEKWHPMRYRYINLFVRLQEGDPPKSQKREPDADGWDKMDNYYAFLQ

SEQ ID NO: 168902 - protein, 206 aa, Heterodera glycines
MNCSSAAMLMLLMTIFTVLSNVNEVAAEEHELVSRIKRNGYGYSSGYGGGCSACQSSCTTCGYTSYHTVPAAPAPPPPPPPPPPPAPVYSQSSYSSCSTCGGSSYSSYPSSSYSSYPASSSSYSSYPASSSSYSSYPASSSSYSSYPSYSSSSSCSTCGLSGYSNSWNNGGSSSNTWSSGGSSMSAGNGGGYGYGGGSCSVCGKRK

SEQ ID NO: 168903 - protein, 337 aa, Heterodera glycines
MTSQPIRVLVTGAAGQIGYSLVLQIAKGDVFGKDQPIVLVLLDIPPLTEVLTGVHYELVDCALPNLFGVEAVTTEEAAFKDIDYAFLVGAMPRKEGMERKDLLAANVRIFKSQGEALAKFSKPTVKVLVVGNPANTNALICAKYAASKIPAKNFSAMTRLDHNRAMAQVAQKCADGTTVGMVKNVIIWGNHSSTQFPDIRHAKIAKGGSETLAYDAVKDTAWIQDQFIKTVQKRGAVIIEKRKLSSAMSASKAACDHMRDWFFVTPSDGRWVSMAVFFYGSHGIPEGLVFSFPRTIDAQKKWRVGEGLYLDDFAKQKIDITKKELLAERDEALAACK

SEQ ID NO: 168904 - protein, 139 aa, Heterodera glycines
GLFYLHSKGIIYRDLKLDNVMLERDGHIKITDFGMCKEGIQGDTTTKTFCGTPDYIAPEIILYQPYGKSVDWWAYGVLLFEMLAGQPPFDGEDEDELFTAITEHNVSYPKSMSKESVLICKGFLSKAPSKRLGCSADGE

SEQ ID NO: 168905 - protein, 93 aa, Heterodera glycines
  unsure (1)..(93): unsure at all Xaa locations
SMEIDSHPSAAVQPEPAPIEHQQQNNTRILPKSKKWWKKALNIRPMANSSTKPRSSWERKMQKKGQPPPXPGRWKAKIRQTVAKTKGTPGPGG

SEQ ID NO: 168906 - protein, 241 aa, Heterodera glycines
MSEKDVPLAFSGPVKFVSNALAGGTAAVVTKTVIAPIERVKLLLQAQDASAHITADKRYKGIVDVLVRVPKEQGFLAFWRGNFPSIVRYFPSQALNFAFNDLYKGILSKNSSSKNGQFLGSFASGAAAGATSSLFTYWLDFARTRLALDIGRSRESREFTGLADLFAKIWRSDGLFGLYRGFSVSIWASIIYRACYFGFFDKAKAYASSDGKRPLSFLERWLIAQGVTMASGMLAYPLDTV

SEQ ID NO: 168907 - protein, 102 aa, Heterodera glycines; identical to SEQ ID NO: 163973

SEQ ID NO: 168908 - protein, 112 aa, Heterodera glycines; identical to SEQ ID NO: 162499

SEQ ID NO: 168909 - protein, 82 aa, Heterodera glycines; identical to SEQ ID NO: 163665

SEQ ID NO: 168910 - protein, 59 aa, Heterodera glycines
IYGVCLTALPGPLVPLKIDFFNPPPPPKPRSGLRSWLVSIGFVSLILRCLGRKFVRSEC

SEQ ID NO: 168911 - protein, 356 aa, Heterodera glycines
  unsure (1)..(356): unsure at all Xaa locations
RGEGGFLINNEGERFMERYAPVAKDLASRDVVSRSMTIEIMEGRGVGPLKDHIFLQLHHLPPEQLAQRLPGISETARIFSGVDVTKEPIPVLPTVHYNMGGTPTNYEGQVIRFSNDKGDQVVPGLWAAGQCAAHSVHGANRLGANSLLDLVIFGRACAISILSANTPGDSLPPLETDAGESSIANLDDLRNASGDVSTADLQLXITLRTMQKHAPCCSKRPPLLQEGIEKGRSLFGLQKXLRVSDRRLIKNSYLVETLELHNLLINALQTIVAAENRRESRGAHAREDFPVRVDEFDYTKPTEGQSKKKLEEHWRKHSIIYQNVENGAVTLEYRPVIDTTLDKSETDWVPPKIRSY

SEQ ID NO: 168912 - protein, 110 aa, Heterodera glycines; identical to SEQ ID NO: 164172

SEQ ID NO: 168913 - protein, 158 aa, Heterodera glycines
MSYAFVRQPHKNSVCLMGWPTTNSVIIRQRHGAETEQARIYWPGSGLRTKSEIEEEFKCARDGKYPEENLEDWSITGKRSLTQKALFHYTDRRAGKGYSDFATTLYYGRPYIWPPVREINRWHFFICVTFALVILVDCKWFVSSFELFRPPKSEAATL

SEQ ID NO: 168914 - protein, 207 aa, Heterodera glycines
  unsure (1)..(207): unsure at all Xaa locations
MLSSSACCTLLAALISAAFFAAANPPTVKQCLCSEIQPCTQKYMNTWKACMEQCKGHLSGVGGNVDKLGHCMXATRHSSNCTIKCTQSHSQTACAKSAASAKQVPKRYPETLEIATISEINRMVNSMGIEGAMKGLMDAGKKMYGCTSKCMNSKAGNCEKSFKCGLDYPPDNVAVQEVKKCALNSGLNTANAQALCKCASAAGVKNL

SEQ ID NO: 168915 - protein, 218 aa, Heterodera glycines
MLSSSACCTLLAALISAAFFAMANAQTVKQCLCSEIQPCSEKYMNTWKTCMQQCKGHFSSVGGDVEKLGHCLDSNQALLQSTIRCTQSHGDESCAKSPAAVKQVPKRYPETLEIATISEINRMINGMGLEGAMKGLMDAGKKAFGCTRKCMNTKAGNCEKTLKCGLDFPPDNVAVQEVKRCALNSGLNTANAQALCKCASAAGVKNLTPAICAKVKVT

SEQ ID NO: 168916 - protein, 191 aa, Heterodera glycines
PDYAKLRNFPSLKGTKAGAPRGGGRSRTSGSPGLQEFGTRKAFKFFFTAFLVSLLSVALHFYFDNKTIFPAKFGERWLLLIAHPDDETMFFGPTLLFLSSIGVQLHLLCITSGNSEGLGTIRRNELYSSASVYGIQPKYISFVDPEERRFPDGFRDWNITSLSALIYSYIRRLKPDGLITFDEWGISGHPN

SEQ ID NO: 168917 - protein, 148 aa, Heterodera glycines; identical to SEQ ID NO: 162314

SEQ ID NO: 168918 - protein, 138 aa, Heterodera glycines
SREYYFVIVGRQDQPLFEMDFPPKKREQQQETHHLLQFIAHAALDIVDEQTLRETQMYFKIVDKFNEWFVSAFVTASRIRFLMLHTQKNEDGIKQFFQEIYEMYIKFSMNPFYRQDTPIRSPSFEQKAAMYGRKFLGV

SEQ ID NO: 168919 - protein, 207 aa, Heterodera glycines; identical to SEQ ID NO: 163498

SEQ ID NO: 168920 - protein, 155 aa, Heterodera glycines
MASSAAGFAIVTGANTGLGLHFVKSLYASGTYSAIVLACRSEQRAKSAIEQICCGQSSPAENGNGTQTKLEFAKLDLTCNDSVRTFVSQLDERPYQKGSLRLLVNNAGIMGHPFQLVDGVEVHFASNHLGHFLLTNLLIKHNWLASDARILLVTS

SEQ ID NO: 168921 - protein, 95 aa, Heterodera glycines
LCRSSYQSLAHLCRNQIRVYSVEREGAGTASGIEHALKFNKAGAVHKKELKDYKCVEYLHQNNYSFYDKECELQQFRVVQPTNKLPDTEPKFKSS

SEQ ID NO: 168922 - protein, 207 aa, Heterodera glycines
MVDVPADFAVLLNSAPPISRIESNKMHWLRKRQQTNATALQRGIDQIGQLATESRGLKRPVTSFARFADSPDEQALYLLWEPLTSDQPTANGGPSSRIYGYLKVVRDRRLYLVDGEGRQFVTTPLCVLDFFIHQSVQHQGKGAQLFRAMLKAEGDLGAHRCAFDKPSDVFLHFLARHFGLERPLWQPNSFVVFPSFFEGIKPEKVSS

SEQ ID NO: 168923 - protein, 237 aa, Heterodera glycines
  unsure (1)..(237): unsure at all Xaa locations
MEKSANNFSKILWTQNEHRFQQICALPFIREQKDGTLAEERYRHYIIQDTXSLEGLSSAIAVAASKATDHPKGHERAMLLLSHGIAILDTELDLHDGILRKLGLVSRSEVHMNYDQSPVCHHYVSFLAATASQQSLPVIVASMLPCYWLYREVAKWMLAERQKAGGTNTVTQYHEWIDMYCSEEYAEAVDEMLALADELSQEADQRTLAKMATVFERSFQLEWMFWKSAYQMCQWGI

SEQ ID NO: 168924 - protein, 426 aa, Heterodera glycines
VSLKAGGDLSVGCQWPGSKDEYELQDAIGVGATATVFKAFCKSKNEMCAIKSINLEKCQTSVDELSHEIQAMSLCSHPNVVNYYTSFVVGEELWVVMRLLNCGSMLDILKRKIKAIGKDQAAYGVLDEVIIATVLKEVLRGLEYFHNSGQIHRDIKAGNILLANDGTVQIADFGVSGWLAASGGDLSRQKVRHTFVGTPCWMAPEVMEQLATGTAPYHRYPPMKVLMLTLQNDPPSLETNADRKEQYKAYGKSFRTVIKDCLQKDPSKRPTASELLKYSFFKKAKDKSWLVHSLIENLGSAPSIPTIPKKVASGKLKKDKDGNWEFEYDTSDEENSSDPENATIQQSASGERPTVSRASSEGKGEEQMPPLQTLNLVLRVRNQQRELNDIKFDYSPNADSVDGIAHELVTAELIDGHDLVVVAANL

SEQ ID NO: 168925 - protein, 148 aa, Heterodera glycines
MTHHLNFDQFLQVHEPQLLASGLPELFWKSLYKKISNQIFDAGKYFEVIIEESEPNETISSQVKAMSELKMDDPENVFLIDHAWTFRPNTARFALQQVDGLRKRLLDMFNIKAWYANKECLKDPFADDSADQQQKCADAVATHSADCE

SEQ ID NO: 168926 - protein, 144 aa, Heterodera glycines; identical to SEQ ID NO: 166624

SEQ ID NO: 168927 - protein, 155 aa, Heterodera glycines; identical to SEQ ID NO: 162219

SEQ ID NO: 168928 - protein, 107 aa, Heterodera glycines
MAEVKKEPIFTEVKKEPIFAAETPAAEPRRDSAVSTMPPDFDDVTAVIEGVLRETRDRFQAMADQIIHRIDEMTQRVDSLEKNITEMMASDSALVASTSGTVDEDNQ

SEQ ID NO: 168929 - protein, 134 aa, Heterodera glycines; identical to SEQ ID NO: 163457

SEQ ID NO: 168930 - protein, 151 aa, Heterodera glycines
MFVRCFILPFISLTFFVSFCTAMRRNPSDYDQSRVPSNLRIISWLLGVWRSEHDGKAMFPTIPKFTYGEEISIALSDTRMNGLPAFNYSAFAWSAHDQDELHSENGYITVSGGKVMLTTVMNNGFVTVEEGPAGGSRIRFKLVDIGRISFS

SEQ ID NO: 168931 - protein, 121 aa, Heterodera glycines; identical to SEQ ID NO: 163984

SEQ ID NO: 168932 - protein, 123 aa, Heterodera glycines; identical to SEQ ID NO: 163758

SEQ ID NO: 168933 - protein, 95 aa, Heterodera glycines; identical to SEQ ID NO: 163272

SEQ ID NO: 168934 - protein, 78 aa, Heterodera glycines; identical to SEQ ID NO: 166621

SEQ ID NO: 168935 - protein, 54 aa, Heterodera glycines
LELSECIPFDLFHQQLIFMLRSSLSKQQRNIFNALKSSAAVRNFLVDFYLNNVD

SEQ ID NO: 168936 - protein, 112 aa, Heterodera glycines; identical to SEQ ID NO: 166620

SEQ ID NO: 168937 - protein, 132 aa, Heterodera glycines
MRYLLRIRNYNFLTKIGKSSVVQSQESPPSLLTDSKPFKKVLNSAVQYYEECIGLVEVHKARDEVNRCENNLFLAQQARREKQGEIKSLQNRLKDIHSELDRTQRGEDRYLHLLTEEHAAIKSERELLSSFE

SEQ ID NO: 168938 - protein, 169 aa, Heterodera glycines
QISWCHGVSTDLMQIDEQQQQQMAAANECCFIYPFPASGLSSRQLMRVLSAWLMPSFSADEEGPSMNVPSCFSDIDSSFECASFSVPMVFSHDEWFVQCVPALCEQLDKLLLLSQHQREEEGNSCLQQRRNTDDDGECHVRRVLRHLLALTTRIPMRTRPRTEMGLFIA

SEQ ID NO: 168939 - protein, 302 aa, Heterodera glycines; identical to SEQ ID NO: 163814

SEQ ID NO: 168940 - protein, 81 aa, Heterodera glycines; identical to SEQ ID NO: 163193

SEQ ID NO: 168941 - protein, 158 aa, Heterodera glycines
GSTTANTRTTISSADVSKAGKVTDKGGDSDDEAAEEFVPTGTFKPIVPLPSKVDVKSGEENEEVLFSARCKLFRYDPMDKKNKERGIGELKLLHNKETGRYRCVIRSDDQLCKLFANFPVLATMISRITGQKPNVRTLQCRDFSESSEGIDEVFLLKF

SEQ ID NO: 168942 - protein, 423 aa, Heterodera glycines
MSTDRYDIVLYGASGFTGQHVLESFVKNGHLDQFNFAVAGRSEKKLKQTLEDIEFITGKVLTKIPIIIADSSDAQQLAEMAKQAKVIVNVVGPYRLYGEAVVKAAVENGASHVDISGEPAWIEAMQMKYSEKAKEQGVFIVSACGWDSVPCDLGMNYLKQYFKGTLSHAETFAHIQIGEAGYSFNAGTYQTLILGLWQAKNDDLGKIRRSIMPEKMEKTKWRPPKRGMFWWNDSLDAYCLPFMGADKSIVQRSQYFDNIADKTYPASLETYILVKSWFWAVALMMWLTIFYFAVKFDFTRGILQKYPGICSGYLFKETGPTRVQAQQASFTYWFFGWGWEQSSPQPDEAPTKRMVVRCDGPDAGYIGTAGCILSCALTILKERSAMPSEGGVFTTAAAFKNTNIYETLSSFGVTFRVDSSVKV

SEQ ID NO: 168943 - protein, 172 aa, Heterodera glycines; identical to SEQ ID NO: 163488

SEQ ID NO: 168944 - protein, 143 aa, Heterodera glycines
SKMRSICFCHFSAFSFSRQFFGGCHRSFSSPMTPLFLSFSLLLIYSQFASPTNAFILQELPLYRNVRNQRHATPPIGPSKPSIDYGIRRSTVSMPLVIRIEDGMPTIFVRPSRAFNFHRLNRLQEFWHRNEALRRLTQTGNRP

SEQ ID NO: 168945 - protein, 148 aa, Heterodera glycines
MVQFDQSFQVSLRLWASSEFGSQGSHKTRQPFALPYAVTHFHALAVPKTTGVQCSKNGTDEQKLIAINSLQKVLAATAVGKCEHQMFQRGETLASKFEDYLARVILNNCYAKFGHNAINTHRKQQFGSIGILNKEVSVMFKEFGGFTQ

SEQ ID NO: 168946 - protein, 142 aa, Heterodera glycines; identical to SEQ ID NO: 163836

SEQ ID NO: 168947 - protein, 156 aa, Heterodera glycines
SFSLTRLFPTLVFHRHGNIQLLQIAAYHEKVIDHYENPRNVGSLDKNDPSVGTGIVGAPACGDVMKLQIMVDGNGQIIDAKFKTFGCGSAIASSSLATEWIKGQNLEYARKIKNQQIAKELSLPPVKLHCSMLAQDAIQAALSDYQKKQEARNEKT

SEQ ID NO: 168948 - protein, 58 aa, Heterodera glycines; identical to SEQ ID NO: 166611

SEQ ID NO: 168949 - protein, 106 aa, Heterodera glycines; identical to SEQ ID NO: 164060

SEQ ID NO: 168950 - protein, 159 aa, Heterodera glycines
FILLQHLNPQKMLSLIVIVCFFGIVPNLSKPIKLRNHSPMNVLFMAWPEARYPLELPFHRVDCFSEMERRHIVPQVITYRLENIKKLRNGICLVRIPTRSRVTVTQMNTNNVKSYVKFIAGSTQLSMPLHTDHIHSGQHEKFGPWHMPCRYAYIVFRSR

SEQ ID NO: 168951 - protein, 231 aa, Heterodera glycines
MSTERYSFSLTTFSPSGKLMQIEYALNAVKGSAPSVGTRAKDCVVFATENKHSVLTQPVSKISKLSDHIACVYSGMGPDAQLLVKKARKIAMDYQVLYGYEIPVPQLVSRVAAVMQEYTQSGGVRPFGVSLLIGGWDSEKGALLFQADPAGSYFGWKSTAIGKNDQLAKKLLEKRYNEDIEKVDAIHMALLAMRETYDVAMTEDNVELAVCTKDCFERMNQEALREQIQPL

SEQ ID NO: 168952 - protein, 172 aa, Heterodera glycines
YWNDSSEEKRRRSGGNWTTDERSIFHGPFEVPLQNSADFCDFRPKCHRIIGSSPQNSVDGPQFVLLSHFLPLRFPWVQSHFWTVRCQNLVEAPKLKGQVVPFSFPAKAQRESVFRRLWPFRCFSLCLKRSLLTTVRLPLAFSSHKAFILLPRPHSLFRFLQLRCFARVAFQH

SEQ ID NO: 168953 - protein, 140 aa, Heterodera glycines
FFVVANWHRQFPAFFQLRFHKSIPRGQCHRLHLLAKVPSRQGPVRENRNNDHVARHHVIKGGLANHLFLRRSLARVNGVFLLLDFDFAFDIPTLQISDFKLFAGELTAGQLVFSPIETFQCTRPIFVEFKSCLFVFAQLQ

SEQ ID NO: 168954 - protein, 162 aa, Heterodera glycines
MGAFLDKPKTEKTNDAGVGRDYKYVVASMQGWRIDMEDAHHVQITIRKESPFEEWSFFAVFDGHAGNKVAFHSAQNLLQTLLNTAEFQAVKEELKTNGPKITEKAKSLIQDGIRMGFLELDSSLGELQGGGERERNGTTAICAILTPDYIFFANLGDSRGLL

SEQ ID NO: 168955 - protein, 206 aa, Heterodera glycines; identical to SEQ ID NO: 162305

SEQ ID NO: 168956 - protein, 212 aa, Heterodera glycines
MAQSQNGGVKNRRISLGSPKDLKEVHFFEEDEVPDVPLNGARVKVCYAGVCLTDKEISNTKQARITHGVKDTSLFPGYEVSGVIDEFGPNATPVEYNLKVGDKVIVWPTEEMCQNGYADFVAVPNLSLLVKIPDTLSMHVASILPAGATWALSAIVHARPVVEAIASTKGCCNILIVGAGGLGLWILTLAKHFLTAGQENRIKLIDAHSKEN

SEQ ID NO: 168957 - protein, 266 aa, Heterodera glycines; identical to SEQ ID NO: 163374

SEQ ID NO: 168958 - protein, 81 aa, Heterodera glycines
VNVTTNSNQISVYAASKFRVDINVSTRDESHLNNKYEILMEINTTDGGKQTILLDSKALVFLHDQLDALTRTFPKCYVCVD

SEQ ID NO: 168959 - protein, 151 aa, Heterodera glycines
NFLFQKEKTIIPMKDENAHFTPQQISKLLNLHIKSHKCLDVKCQTERQQLLSTIEKLARNFYDIYKMFEKQKREMSRISNLYKDFCIQFGLPVKIDLVKQQEISQIDKVANMIYQHFIKIREVNKKSKVHPNFDENLQSSGLTSINGQCKK

SEQ ID NO: 168960 - protein, 291 aa, Heterodera glycines
  unsure (1)..(291): unsure at all Xaa locations
QLAVHLLVQYSTMLDITARAFQRPFAIAFLMPSQPTAKNVEAFQQAAAELLMPIIACNKRYXIRFCVKXMLMLSERDQQNVQSYYSTSGNAQQIVIVSNKLKSVVQKTNAWFERVSDQLCESDGSADECFCECAGPEEFRQFVVLLAQKHSSCALLNLMELAPCKDVKLKHSIQEAYLRLTDTEVAKGLLFCGQTAVVRSTFGANSELPRHETEDPNRTEEECIPLVVARESTLKTLSYRLLRCVYPLLTGERIVILASKQRVSTGVDLLNKLNSMRICRRPLWRKMEFRF

SEQ ID NO: 168961 - protein, 207 aa, Heterodera glycines
MASQPIKAVLFDLGGVVVEYSDRNAYLNRLKIIQSNAKFVDLFEQFECGLLTIYEIEPEFLKTVMGNKSGDDLIKAANPTNLMKTKNPFVENAIRSLRSSGKYLVGLLTNNGFWVRDRSESKLIIDTSDFDFVIESCKIGARKPNADFYEMALLKMGLSAAECVFIDDLEENCKGAEAVGIRSIWLKDDDYKTAIEQLEEIIGEKLL

SEQ ID NO: 168962 - protein, 174 aa, Heterodera glycines
MLLSPPLLFVLSLCSLCAFGHKTPNASDGPAMPELPKALQKLSDAERNCLFTIYTMSKLFENKKVQKTLAKQLKSCDSKDTSEPDIWKSREKSNGWCEVNLERIDSEYGPVIMHAHGSIASINGARLFVKSTSGGIWIAIYQPECLKEKDESKKSEEGVVSNTLDRVRRWVLLK

SEQ ID NO: 168963 - protein, 156 aa, Heterodera glycines
MTSKIESTIASSFRKFLFWFRYDGSKFPAMAKGSDSRNGPSVMQVVESCLQKLFATENSDQIKTFAISRTDAKVHAIRSPILIGLPVACDWFSQSELARTEFLLCFNDQIRNNGFTNAIELLHVDPVAMGFHPCFHVSYRRYIYRLRVISTEQSLN

SEQ ID NO: 168964 - protein, 56 aa, Heterodera glycines
  unsure (1)..(56): unsure at all Xaa locations
GKLHXRXWRPLLRTSGSPGLQESGTRQGPNLHFVSNIDGTHLAQVLKKVEPKTVLF

SEQ ID NO: 168965 - protein, 125 aa, Heterodera glycines; identical to SEQ ID NO: 162260

SEQ ID NO: 168966 - protein, 94 aa, Heterodera glycines
  unsure (1)..(94): unsure at all Xaa locations
HLSGTVWHRKGITCPSQGKFGHLRFLRQALLLRDALSVPSVPSVLKVPFDVKHNELEMILLFYFTGLFHFSFLISKQFFLICKFFIIYINFHLX

SEQ ID NO: 168967 - protein, 152 aa, Heterodera glycines; identical to SEQ ID NO: 166605

SEQ ID NO: 168968 - protein, 155 aa, Heterodera glycines
MFSQLFLFLIFLAFSAESAPRGEKKKDTPKDRYSLCRKGGVPIAKLNDQINGKDFDKLFAPLFPHPLLISNLLSLEGLKCPDKIAPFLKKCDAKKDGEINLREFKCFVKSLLASYLVDEDRNKCITEEELESFYKECGLKEMEEEMMGDGSVRKE

SEQ ID NO: 168969 - protein, 271 aa, Heterodera glycines
  unsure (1)..(271): unsure at all Xaa locations
MIFRLGNFRHFPVNFCKLCIARFTVAFSRRIFRDHFSLFLRSKRSLLFGASLVGVSFGSNVTLEDEYKRIKTECKECDPFSPPPTDEGWTLFWCNKSLAVYRRRFVANGGNCVFEYRCIGTYEDISPNDFVTVQEDISCRLKWDKNVXALDELDFDYNTGTQVIRWESKYPFPLWPRLYIFARRQFVDRPRKQIYILSRALSSDNFPDPSQTTVRVECYESILIVRAHDSLDKKGLDFVLSYYDDTRSSIPQKIYQYGINVIGPSFIEDVH

SEQ ID NO: 168970 - protein, 319 aa, Heterodera glycines
MAVPSISPLGRPHPPPPPRSPSRPSSKHSFAGDHGSFLQTSPINRIVDEEGQEWEVEEVQLDVSKTGLGFSISGGCDREPDLMYNDRYIRVTDISKGGAVETDRRIRIGDVILFVNDWETANREHDFAVQALKNAGTFVRLLVKRLKYPPLQKSLSQSHLSEPIASGTFQRSLSGGAADSRTLPLQPPVRSQSLHHLPMNAVATSPNVVTAMGTLPRRANVQQQFATPLNDPGRQPRWVVIRKGEMGFGFNIVGGEDGEPVYITRVAPGGAADQTGNIRMGDVLLRVNDVDLSMATHGEAAVALKAIPQGAQVKLLLQF

SEQ ID NO: 168971 - protein, 148 aa, Heterodera glycines
EHTFLQGAGQPDCSHTSDEYCQLPYYTAIHELFPPERSRWVPLPTQPPIASPLSVRLVQRQHLPGNQLNLTIAIQGGTDKLSLHITPLNGFQLRHWSLTPFDPATFGIRKTYFVFMTYGFESPGERLVWILLENNERSVSATDEVPSL

SEQ ID NO: 168972 - protein, 166 aa, Heterodera glycines
DEWEGCACPSQSPGTHSFDRNCQFCFPTVISPKVQVSEYCDFCLGTNLQNAEGEAEPLISCHDCGRSGHPTCLKFTKNMLVSTKRYGWQCIECKSCAICGTSENDDQLLFCDDCDRGFHLYCLKPPLKEAPETDWSCHLCVKEFGAEASIAKATKSTEDGTSSPAK

SEQ ID NO: 168973 - protein, 192 aa, Heterodera glycines
SSNCAALDEFLSIIGHRVQLRHFAGYRGGLDTVHGQSGTEVRWGRVGRAYGTVCIGDAQQLQRKRHIGNDIVAIVFQEQNTPFCPDMIASNFLHAYLVVHPIEPGTDRTRYRVSMTARDDVPFFGPTLPRSSIIWKCQLRDFLLTKLINAENAAYKAEKFAKLAERTRASLLDGLYSNLKERAQFYGMAFLD

SEQ ID NO: 168974 - protein, 54 aa, Heterodera glycines
FIADLVVGLATGQIKTGAPCRSERLAKYNRIMRIEEELGTDAVYAGKSFRNPQN

SEQ ID NO: 168975 - protein, 102 aa, Heterodera glycines
TLYIKINKLTKKNSHLNLKWKMIFRAHQQLKICDSRRGGRTFANKERPTVTPMRKFVQASAADPSSNTSGAHFLRINCVTPIGAHRLNGADRTDRRGKLVII

SEQ ID NO: 168976 - protein, 125 aa, Heterodera glycines
LTQQMVRNGKAVTICDQMNMRKRNKSLADNQSIPLFSFVVDGGGRVFRQNIIHLLAQMERVLVRHFPEKCFNHFGTVLCCSYCSTSSRTLSINRLDSSKKHSGMGANALCSASATIIRFSSSTLS

SEQ ID NO: 168977 - protein, 78 aa, Heterodera glycines
TIQQMIKNVKAVTICDQMNMRKRNKSLADNQSIPLFSFVVDGGGLVFRQNIIHLLAQMERVLVRHFSEKCFNHFGAVL

SEQ ID NO: 168978 - protein, 65 aa, Heterodera glycines; identical to SEQ ID NO: 127533

SEQ ID NO: 168979 - protein, 153 aa, Heterodera glycines
SAVTPPTTTTTAAESGGEGDGRTETTSGQRKRHSANQTDSANGAAGGQGSNNAVVLSSSESAAKEAKVRKMSTTSQNKGHKSNTMAEDSGGGTGTSAASSGNGAEQNDNSRATRRPAELQHLIDYFPDQQSTDGNRMTRSKARAMQDKSSNSA

SEQ ID NO: 168980 - protein, 158 aa, Heterodera glycines
TTHRTEQFANKFLMSKHQKSAVTPPTTTTTAAESGGERDGRTETTSGQRKRHSANQTDSANGAAGGQGSNNAVVLSSSESAAKEAKVRKMSTTSQNKGHKSNTMAEDSGGGTGTSAASSGNGAEQNDNSRATRRPAELQHLIDYFPDQQSTDGNRMTR

SEQ ID NO: 168981 - protein, 162 aa, Heterodera glycines; identical to SEQ ID NO: 163474

SEQ ID NO: 168982 - protein, 234 aa, Heterodera glycines
MLKMRSVVPHFPPLPALRDFIYMYRMDADKTLSQNYLMDMNLTRKMVRRAGDLTNAFVVEVGPGPGGITRAILEQPCKRLDVVEIDKQFLMPLQHLSNHSMERMNVHRADVLKFDFEQVWTDAGAAKCSWVEEHPNFHIIGNLPFHISTPLVIKMMRQMSIRRGPFVFGRVPLTFTFQSEVARRVVGEPCTDFRSRIGVTCQNLTEPRILFNVPGKCFTPPPDHDVCVVQFLPR

SEQ ID NO: 168983 - protein, 57 aa, Heterodera glycines; identical to SEQ ID NO: 166596

SEQ ID NO: 168984 - protein, 229 aa, Heterodera glycines
ANNRLNLRNETEQNFPLNLCRPFASPPPKWTLWRFDCRDFPNHCTVKTCAFCAEVNKLRPTAKNIVNETHARWDSMKREKSFDDAPTLLRMATDTFLPSKLTKSVFFNHKLGVAIFRDEIPPKFESVENLSGGIFQLYFHGTSGRQSAVTVQKLDALFIQTVRSLFGMPSPIACHVHGLFYRCEINPGNRRDPISYGNLLDLPFMAKFEVPLCARNFLIRQNWQKSFKL

SEQ ID NO: 168985 - protein, 165 aa, Heterodera glycines; identical to SEQ ID NO: 163949

SEQ ID NO: 168986 - protein, 114 aa, Heterodera glycines
VPFISGILPLIPFISSSAASFGVTSKQSPLLNLGGAVNNAKELPVLAGAMVMLSLFQLAAAFSLLLYGCRTFGRTMRHVENIQRGINALQSQQNPGGEIGEQEKDAGGEMRRKL

SEQ ID NO: 168987 - protein, 207 aa, Heterodera glycines; identical to SEQ ID NO: 163063

SEQ ID NO: 168988 - protein, 174 aa, Heterodera glycines; identical to SEQ ID NO: 163472

SEQ ID NO: 168989 - protein, 48 aa, Heterodera glycines; identical to SEQ ID NO: 166591

SEQ ID NO: 168990 - protein, 159 aa, Heterodera glycines
AADDCRKALDMDRKNVKANYYLGKVYVHQGQFDEAIKVLSRAHEGVLNLKQTYGDEITQLLRLARREKFRQEEDKRITQEIELQSYLNQLIDDDIAKKVNQLEDKKENDVEEKAEELKTQGDTFKKQLNNLFAQVDDRRRKRDLPDYLCGKISFELLKD

SEQ ID NO: 168991 - protein, 148 aa, Heterodera glycines
MSSVPQLSASEHKERGNRYYQAGKYEEALSHYTRAIIKNPNDPTYFTNRALCNLNLKKWDSAADDCRKALDMDRKNVKANYYLGKVYVHQGQFDEAIKVLSRAHEGVLNLKQTYGDEITQLLRFRQEEDKRITQEIELQSYLNQLIDD

SEQ ID NO: 168992 - protein, 152 aa, Heterodera glycines
ISNGFAAVPIPWVNDVDNFELAKFDYSPLPKFAENLPNRVFCNCKGTGGCSAQKGCACVEMSTIELSEPGRVHNAHLLSENAFESRFFECSSLCSCAGTCANRLAPQNDAQRNHLQIFKTLKAGFGCRALKPIRKGSFICFLGGEIFPFDYP

SEQ ID NO: 168993 - protein, 139 aa, Heterodera glycines; identical to SEQ ID NO: 163469

SEQ ID NO: 168994 - protein, 126 aa, Heterodera glycines
GSGTETWHLRQIQLRVDWPSKRKGRTKCGGKSSGGTLRLALVIVKLTAFVGGQRPRASTFSHPSVMVHTAGTANYSLTLAVAKSESHRQNGKDKQQMKCHFFLVPNSCSPGDPLVVERPPPRGAPA

SEQ ID NO: 168995 - protein, 201 aa, Heterodera glycines; identical to SEQ ID NO: 163467

SEQ ID NO: 168996 - protein, 211 aa, Heterodera glycines
MLPLTPAKRFVSKKHCVDSIRWLSLQRTTFAKTIPPGPLLFSHVYLPERTPDGQPQRKPSEHPDFMKYDFMADPEFEKPPPPVELFLLEDIKDLGEKFDIVKVSAEVARWDLLLKRRAVYASPFNLKYYAEKRKKYLAEMESRVRIPLDLLKMSALLMSQILPVTVSADVEWTLSSEMLINSTQSLGLYITEPGIIHLDNVSTLNGPRPEH

SEQ ID NO: 168997 - protein, 122 aa, Heterodera glycines; identical to SEQ ID NO: 166586

SEQ ID NO: 168998 - protein, 398 aa, Heterodera glycines
HSQFFFDPNCPETCSPFYLDALFRKGHLVIRMLEKRLPKEQFVKVLQRILSLGVQYSQNLYRPVEWTHMLINTAMFLRVMTDVTGKELPSFVEQWIDFGGFVNFQVSHIFNRKRNIIELELRQTVPLREGCRNYTGPLAIVVQELGGLFAHTIQIDAAVSRHDIQCHSKGRKLKKKRIMLGTGEEVDVDLNSMDFDSPVLWIRVDPNLLLYRQMSINQPFYQWELMLLHERDVLAQQQAIETLCRFSEHKTKILLEETVRNDKFFYRIRREAAHCLVQIYNSLPESRLGESPPLIDYFRQNFGSKTSPDIPLPNNYAATSSNLQNNLLGQALPAAIGLIRGQDGRECPEYVLEFIINLIRLNDNSTNRYSDDYYRGALIHALGKTLTMSERTVEQPDC

SEQ ID NO: 168999 - protein, 108 aa, Heterodera glycines; identical to SEQ ID NO: 162680

SEQ ID NO: 169000 - protein, 193 aa, Heterodera glycines
TIPIVVHQSRKKRRFLVQNWSINTLKNQSVICLSSFSLSPSCHVCCCLRCCSNSAMHSRTNSRACTMSRFRRSCALRFALYVGRMTRPNSSMNSNSCWYLLPGMFWCGALTWYWGNEAMPTEGATTAEEETVCCCCCCCTWFAMVAACCWTIFCIANAAVAAAAVPPLVTGGSFSSALSMAQQFLLFFFNSSN

SEQ ID NO: 169001 - protein, 206 aa, Heterodera glycines; identical to SEQ ID NO: 163967

SEQ ID NO: 169002 - protein, 151 aa, Heterodera glycines
MEAEADFDSGLLSTEVSHRRRSASVSEDYSVQKTNDDATECKFVAAQLGYYSDRFIPAFIHACNSEKPHHRDPEITRGYWARTNAITSMVVQFVQLAGPSTQILNLGAGFDTLYWRLKDAGLSFYKFVELDFSSVTAKKICQIKRNKNVNL

SEQ ID NO: 169003 - protein, 110 aa, Heterodera glycines
MKLVLFGVILLGTLLCQCHSDSVAVEQSKVDAVDVGDASHMMLTRAKRASGGRWTTQQIIECIFAIFIPPVAVLIHGGHEWVLHLIINIVLWILGWIPGTIHAFWYCFFR

SEQ ID NO: 169004 - protein, 66 aa, Heterodera glycines; identical to SEQ ID NO: 166578

SEQ ID NO: 169005 - protein, 146 aa, Heterodera glycines
MLIKLVKATVGVPSPVALRAVSARGVGSGTHWIGNDFEDFDKHYKTGLRDAVPIAAFWKKFSAFVMMPLLVFAGYCGWKDHQNVHHSPRPEYVAYEYLATRRKPFPWGDGNHSLLHNPATNWVPGVGYEAPWPGDAHKKEGDSGGE

SEQ ID NO: 169006 - protein, 139 aa, Heterodera glycines
MALCVAIYDKHDALLYLRLKDRMSASPLEVQRFLHSSCDIVADKMNSPGNKATQQENFLGALLLSDRFRSFAYLTNTGTKFLLVIDAEEGTLKDHEIRLFFKNIHTKYCSAISNPFYSFGSTLQSSKIDAVVNELLTSF

SEQ ID NO: 169007 - protein, 175 aa, Heterodera glycines
MKKQPSALLPQRQQFRQLNPPLTHTMTSLANLHNATDDDHFGRLLESSVQSNVVVLNFHADWAPQCKQMNEVFGELAKLHPAVDFISIEAEELVDTSELFDIAAVPSFVVLKAGKPVDRVNGANAIELTNIVEKHAKAAKSRSAGANADFSDTASTAAGGAGADASMAAAPLAPA

SEQ ID NO: 169008 - protein, 166 aa, Heterodera glycines
TVVDVAEETVAQSMDQLEEGIEVGTVVNEEMAQNVPEEPMASVQLAKRSKPFNQRIVENIGWRKEFGRVPPKERDSLGLIECIDGATVGCNQRLLASLKSSNPSLFLRTDKFRSRNACGNKKSEVSLQIDEFDEFYKRWISNYEQEGAGKSHGEENSEHDGKEESE

SEQ ID NO: 169009 - protein, 144 aa, Heterodera glycines
MFCQWRIKVKSNNFLNSFSFYCQKQCLFSSQEKCNNKNKYLPDEDGIVRSEFQSVPIQSEPFTETLLNRIRQFSAEQPKRAIFVDAENPSNITTFGQFLSKTHSAAHFLNSIGFSSGDVACVILPNCWHFFAIFLAASMHKACI

SEQ ID NO: 169010 - protein, 201 aa, Heterodera glycines
MSNSGELTFSDKDDVKGKTEDDKSRGTKRKKRKDSPSSSSSTSSSSSSSSSFSSSSESDDTSLSESEGPPAPSKVKKSKLTHVINPRKIFIHEYLMSKLHVSDVKRLPAEISQKYQMVQKELIGKFASGDYAKKPISFRIDEITLAGAAAQKAFNRGPTVAEYFLKKNGITLKHPQLPCLVQSGGGNHKSFYPMELLFFAQ

SEQ ID NO: 169011 - protein, 223 aa, Heterodera glycines; identical to SEQ ID NO: 163754

SEQ ID NO: 169012 - protein, 79 aa, Heterodera glycines
NINFIRSKKSKIIKINQQRNNIKRHVLFSTKTTTAWHGHYQSVRLSFPASPFLFALIFLAFLLSSVPSSAFCLSFSASF

SEQ ID NO: 169013 - protein, 156 aa, Heterodera glycines
VKPKLNLFMFFVNLAAILIFLQFYLDLTEAGIECQPNGVCRDVSGSTPASTVCSKKCYSCTYKNCCNKVYTSQYAKCSIKGWRKKGYIGNVPVEIGATKKRDVYCSKSNPCAKEGYKCVAYKKGDDRGFCWREKVEKGPPSSFALAIAIAGLVILL

SEQ ID NO: 169014 - protein, 214 aa, Heterodera glycines
RMFVPKSLWPSIQKGLAELASQTKMGDVRDPSIFMSAVIDAKAFKRINDYIAYAKGAGVKKDGTRLVFGGKCDDSRGWFIEPTCVEVDNISSLLLKQEIFGPFIAVYVYNDVDAGQLVRSLKDQTPFGLTGAVFSQDKDFLYEAKDILRDAVGNLYLNDKCTGSVVGQQPFGGARQSGTNDKAGGPHYVLRWTSAQVIKKSFGPLTEWRYPHMD

SEQ ID NO: 169015 - protein, 114 aa, Heterodera glycines; identical to SEQ ID NO: 163339

SEQ ID NO: 169016 - protein, 154 aa, Heterodera glycines
MDNTNNKFILLKNGAKLFYASEECVRQEAKNFVGGIVGLNGPSDLEEGIYEGGLKIWECTVDLCNFLLSNYQTMSGIDILELGCGAALPSILALSMGADSICVQDFNTFVVECFTKRNFKLNGHKIDGGKCAFINGRWGGEILGKIGQKKFGLI

SEQ ID NO: 169017 - protein, 169 aa, Heterodera glycines
DPRAAGFGTRLVPFPRLHFFMVGFAPLTSRGSQQYRALTVPELTQQMFDAKNMMAASDPRHGRYLTVAAMFRGRMSMKEVDEQMLNVQNKNSSYFVEWIPNNVKTAVCDIPPKGLKMSVTFLGNSTAIQELFKRISDQFTAMFRRKAFLHWYTGEGMDEMEFTEAESNM

SEQ ID NO: 169018 - protein, 166 aa, Heterodera glycines; identical to SEQ ID NO: 162590

SEQ ID NO: 169019 - protein, 222 aa, Heterodera glycines; identical to SEQ ID NO: 163443

SEQ ID NO: 169020 - protein, 261 aa, Heterodera glycines
MSSSTAELNPEDGGHPPQNTAVAIEQSQQAIHPPAQSGSGKIAAWASPNADDTEPYGICAKILIVLSYIITIITFPISVFMCIKIVQQYERAVIFRLGQLKKGGAKGPGLFFIIPCIDEYRKIDLRVVSFQVPPQEILSKDSVTVEVDAVVYFRVFNATISIVNIENSTGSTKLLAQTTLRNVLGTKTLSEMLSEREHISHQMQEVLDEATEHWGVKVERVEVKDVRLPREMQRAMAAEAEATREAKAKVIAAQGEQQASR

SEQ ID NO: 169021 - protein, 132 aa, Heterodera glycines
ENECGQCKHCLDKNDCFLNMITAWAQNGEIEWPRVLGENPNLWGKEQKVLADAKATEDKQFQDPKFEQNFKAMNAIGMAHRGAYHYFRGEPGSAGALEQVRHFLNTSIRAGFNVHKDFAVVNVEIYKNEGAD

SEQ ID NO: 169022 - protein, 234 aa, Heterodera glycines
DISSSQLKIFSVFLLFIDFVFPNNHENFVTLAQFRAGGEKFSFAERRFLLYDVNPGEGFNLRRDVYLRVANTVRQLREKGFDFVLVLPPWGNCWHWRTKPRQTKIRWSELFDLDSLSDFVPVIEFDEFLEAQGTSVSTVLYLQHYAEGWAEGGEYTLKYDIRPCIEADKYYAKRGDKWNGHFFDYADHFHAKDLQCLSIQGQSSTLAEAIAQLFPEGRSLMVDRAETILHDQFG

SEQ ID NO: 169023 - protein, 138 aa, Heterodera glycines; identical to SEQ ID NO: 158760

SEQ ID NO: 169024 - protein, 41 aa, Heterodera glycines; identical to SEQ ID NO: 166559

SEQ ID NO: 169025 - protein, 35 aa, Heterodera glycines; identical to SEQ ID NO: 166558

SEQ ID NO: 169026 - protein, 149 aa, Heterodera glycines; identical to SEQ ID NO: 166557

SEQ ID NO: 169027 - protein, 181 aa, Heterodera glycines
MQQKCTFSLITQDKTEVVVPSDFVDQSDMLSDYAKMQRQNNGDAEELQAKFEMTNEMPLISKFHLEMIFEFLGTYREEKQKENEGAADEKQTTKSGERVAEATAEESAELSTMPKWAFDLFDKLPKNDLFLAMNAANYFGIAPFVSLSAAFVCFQILQKKGKREVAEYLNMDENDNNNNGK

SEQ ID NO: 169028 - protein, 231 aa, Heterodera glycines
MTYEEDYMSSAFLAKVEDVKPGVGTGREGRRILRINANREEAIERQRVEKPKSKAELERDRLMEGLNNPIRAESKGFQLLAKMGYKEGMRMGRSAADEQQMDSRTKEPILIQLRIDRSGVGMDEHRKEKQRDLCEAHMERMKRQADNEEELAIDFRRRKRAAMEMKQLISEIQKLRKTCQEMDMRMGKTIPDEFWFWPIYSNNNELVDMVEVVDKSNQSMDENKRTKREPS

SEQ ID NO: 169029 - protein, 239 aa, Heterodera glycines
MAMIPFNLFLLSALFFTANAYDLIFKNISVPDELKDKFECTFEVKKGNGENECGLGELETDGRRNGELKWAEDKLCIKVKCEEKGNDTKFAFRLQQCELVDLKKSDKPMKRPIHLIDSNGCLASNAKGQWPKLNPPLNYSFEERTVEMRGWTFGNETDIGQFPDEATLSCAVEICADPCEQSCLDKISLDKCSLNDFIGDKNATDICHEGNAAAVQGTISFCLMTLLMFLCSSTVLMFQ

SEQ ID NO: 169030 - protein, 195 aa, Heterodera glycines; identical to SEQ ID NO: 163451

SEQ ID NO: 169031 - protein, 162 aa, Heterodera glycines; identical to SEQ ID NO: 166552

SEQ ID NO: 169032 - protein, 128 aa, Heterodera glycines
KLTPFFYRSLLLSSSSAACVANVKKGSQIVSESDVSPFGAAAPWVDAHVETRAGQKGLLLLQIGRIVIIGHGFNAIGEEQIQKKPKENETHRPDLGVEFEVERCTKNAMPSHFFVGVKRRNSKGATLS

SEQ ID NO: 169033 - protein, 137 aa, Heterodera glycines
MLQFEEAMAQFNAMFPNLNSSVVESVLRNCDGDVSRTIDELLRRSGQEEGNNSETDERRKSVSTPPRDQCANDEKIALLVQNREFLRYLRRDPNFQREMLGRSNSSDYRHRHHSSTHRRRNLPVLLTSSRTSQSPNS

SEQ ID NO: 169034 - protein, 81 aa, Heterodera glycines
HFVFKKTFNGVGGMTPVPMLRKHPTFTALRKILKKRKKNLKNLFCCCYWCFTLYLLKLFQNWISWSSSNDGLFAIMPDKNE

SEQ ID NO: 169035 - protein, 226 aa, Heterodera glycines
SLSKMRLASLFSVLLFLLFIHRTIPSPSPKFDEAIKDNGIFAFDSSVEDSAEEVPPSPAFADSLRSPHSSEAEEDGPSAEEEEQFVDNVAGWRPRPSFLPPFAVQNRCLKAKFFDSKSDECRPCSICGPDLYEREKCRTDSDTVCEWCLTNLRVIVRNSDFRVKCEQLIALRDQFRAALVQHSVVEGKAKPTIYSVSMFENASKLWKIELFVEMAFYITLIALVLA

SEQ ID NO: 169036 - protein, 161 aa, Heterodera glycines; identical to SEQ ID NO: 163757

SEQ ID NO: 169037 - protein, 131 aa, Heterodera glycines
MDIRSDQHRYPFCIVWTPIPLISWLFPFIGHIGIATSKGIIRDFAGSNYVSEDNMAFGWPTLYHQLNPEKVNGGSEAWDNSVAEASDEYKRRLHNLFLDNCHSHVSLALNTMRYDGKSNWNNFRVAADINL

SEQ ID NO: 169038 - protein, 109 aa, Heterodera glycines
APLSLFSVSIVVRKQVPPTFSCTTPSGTSVAPAGMPMFIAKAPSMFSSSLIDRRVPWCFAVPYLLLVPSRLPFLETHFPIEFFAVRRFGRASTFLNNVRENFAVSFVGL

SEQ ID NO: 169039 - protein, 119 aa, Heterodera glycines
FFFFFFFFFFFFFFFFFFFFFFFFFFFYYYFYSIIFLLTIRLLVQLISRISVQIPCPFRCPCPCPFRCPCPFRRPCPFRRPFHRQIRRRPFHRRSHSHHSRSHHSHSHAFAEVEHYQFH

SEQ ID NO: 169040 - protein, 45 aa, Heterodera glycines
VCVLSKKKNREDTTKQIQKMVINFVFLSSVALIKCPDALCQASRK

SEQ ID NO: 169041 - protein, 37 aa, Heterodera glycines; identical to SEQ ID NO: 166543

SEQ ID NO: 169042 - protein, 91 aa, Heterodera glycines; identical to SEQ ID NO: 166542

SEQ ID NO: 169043 - protein, 221 aa, Heterodera glycines
MCFSGWIPPFWLPLVKNTTRPTTPVLLCQVRRLLSLNSNSPSKMVVARLLLLQWLMVEVANSIKSLLSRNLKRRPLSWITHLKRNRKKPDAPSDAAPTVVDSLPSPTSTPNKKDEVMAISAVAPPSSIVDVPKTDDTAPPPSLSQPVAATAAAAPPPTSEQQPNPAVVTTAAANNTNNSLAQRPKSVVAGSYAAIAAAARGNGPNNVDNIVTVHVPAATNG

SEQ ID NO: 169044 - protein, 102 aa, Heterodera glycines
ERCLTASFFALIPLIAQAFIGKASPVAVLQVRFNCPWHRSGYTPNFFGFKVKRKLKMRTVERLSQTEGSRHILMRRVLSEKHFVAWNWPSKKPRNDRLNYPL

SEQ ID NO: 169045 - protein, 145 aa, Heterodera glycines; identical to SEQ ID NO: 163444

SEQ ID NO: 169046 - protein, 172 aa, Heterodera glycines
WIPRAAGYSARGKEFDHSEEVVTKITLETILFNFGNLSVHTTRANNLDTKHSAGRDTEKMLQSDCHLPKVPLRYFPYKVPRRFLLAKQRQKLRNSQSDSAGSTFSYENSLLNARLDGCEFDGRSLTSDTKEFADVQQSKQTAEKRPRCPSSSATSAFSAYRTAPPPPRPCWL

SEQ ID NO: 169047 - protein, 47 aa, Heterodera glycines
ERKKELRHQNAEFGTPFHIVGKLKQRLVVKSSGRTLLATFFSAQYPA

SEQ ID NO: 169048 - protein, 185 aa, Heterodera glycines
SNEDFDYLSALSGLYTASVERRKCNLLVLVQGNLDNLEGKMVILTIHDVGKNHLSFVDFVNSLSMAPLRGRSLFLHICVPGQEPDVPIFAGSSFPSMDQLGHAMVQVLRHFKISHCFAMGEGAGADICCRFALDFPSMVRGLVLIHCTSTTHGIVENIKEIFAGLRLEDGEMTHSAWNYLLTHRF

SEQ ID NO: 169049 - protein, 304 aa, Heterodera glycines
LFEQMLEVRAVGTNIGKEQDGPSYEMLFRLTTTNRSKSAPFLAKIPTKTLKREVANEAKTNNSTNDDERKEEEQFASLKNRCHTIASTSAPFASTKVQQNGVDSNHSPSAKQSSSSSPVASTKTFRRRTAFETSEAMREIFGAYSPFSSQKKENSGEFNRKKMALENGRTMNGTQQNNKTAIRPSEFEDDTESRDFENLSMSVSEASSEVGSVSIQDGAMLNQNERPMLENGITKRNVRLKSDLRISPASSGSWERAIRPVVNKHHNANAASVGRRPAANTQRSSVCWYCGVKGHAAAHCQKKR

SEQ ID NO: 169050 - protein, 268 aa, Heterodera glycines
  unsure (1)..(268): unsure at all Xaa locations
MDAIKKKMQAMKIEKDNAIDRADAAEEKCRQTQERLERVEEELRDTQKKMMATENELDKAQEDLTAANNLLEEKEKKVQEAEAEVASLNRRMVLLEEGVGTSLRSALKLATEKMEEATANCDESERVRKVMENRSLQDEERANAIEEQLXKEAQSLAEEADRKYDEVARKLAMVEADLERAEERAEAGENKIVELEEELRVVGNNLKSLELSEEKALQREEAYEEQVRQMEVRLKEAETRAEFAERSGQKLQKGVDRLEDELVHEKER

SEQ ID NO: 169051 - protein, 155 aa, Heterodera glycines; identical to SEQ ID NO: 166522

SEQ ID NO: 169052 - protein, 133 aa, Heterodera glycines
ATKGAKIGLWVDLTNSDNFYNEEEVLNNGSKFLKMKMVGHKQTPTPEQTTAFIEAIDRFITNNPDDVIVVHCTHGFNRTGFLISAYLYEKCDMSIEMAVREFAECRPNGIYKQYYLDDLRKRYGDEDEDEMTV

SEQ ID NO: 169053 - protein, 125 aa, Heterodera glycines
RNIAMGKYDPEEGYDSNLTDLKLFEAGEPFEMQIKLLKRPSEDNLPMTEILSSISLSLTMTVIVSTPKGTSQTNYTLDSESYRDMNYITVRGDLELFAEPSLLNDITHPILPVLILHRYRLYWYR

SEQ ID NO: 169054 - protein, 227 aa, Heterodera glycines
  unsure (1)..(227): unsure at all Xaa locations
FLAESATTRKQDTAQLESADLAFANLMQAEERVHEREQEQRLRNSQSVQMEVDKFQSSQSLTGKRTHKFTLWVDKYAPSTFLDLLTKXLLLWLRLWDECVFEKRGGKKWEGNHRRISQRNNANATSLWDNLEERDRTLFEMERPKGTDSRMPKQKILALFGPSGVGKTSLARVAAEQAGYRPVIIPISELQNMAELKSRLENATDCTSIDALFHNLSVSAASAGEAP

SEQ ID NO: 169055 - protein, 106 aa, Heterodera glycines
TTPLIRDFSLYQFFFYFGLFYFCSTPSLISGQPISFISGQPPFPISLSSLKIFPFNYRSVPFSPFILVNLPQSFRSVPFPHLLIKWHKFSLGQCHSSFFSNCAQFF

SEQ ID NO: 169056 - protein, 279 aa, Heterodera glycines
  unsure (1)..(279): unsure at all Xaa locations
MPSSDFPMPYTSRLSEPCLAPGQSLVFQGSVDSDARHFELSLISGVPNSGQERIALQICFHFEVGITILNSMLENGEWGEEEFHSNPFFHGKPFDVRIRVHEKRFDFFVNQVPWAVFEHRTDFRKIDHIQASGDVSLSAVHWGGRYFEMPYEMTFHDHALESGQRLFVYGIPRRRFRRFTDQRQFGGAVQNECTXFDKQIVVRNAQTDKEWGAEESEGGPFPFRKGEGFDLVILNEPLALQISINGTPFCSFFHRTIDAHKDYKKVRISGEVELTGHGK

SEQ ID NO: 169057 - protein, 170 aa, Heterodera glycines; identical to SEQ ID NO: 163075

SEQ ID NO: 169058 - protein, 61 aa, Heterodera glycines
ICIIFNLNIYFCTFCTLICQQFVVETKHTLLINLIVQLLSLCHPPPKKKNFHNSQMICCPI

SEQ ID NO: 169059 - protein, 292 aa, Heterodera glycines
VQLVHSEFPPPSVALSHQFDHWDALRGRKGIDKFEHFSAASSTKSNRFLVCTAFGAFLATNFENCAVLERICDSRLGKNPKEVKRFELPFRIGKISAGRDHLIILDSLNGEIWSFGTGTRGELGTGRVEADNWAEGPRRIPSFSEADIRCVDIESGAWHSLALTAEGDVYGWGWNGHGQIGHLSTEFSIQPTPFPFDLGDGRATMIRCAGNNSFLLLSDGSEMEFGEICTEKPMDEQMAEKMPENGSKNGTEKDEKKGQSQEKDGKEKRQSPSAKRQRHQRTLKVAVVGCSH

SEQ ID NO: 169060 - protein, 393 aa, Heterodera glycines
MVNKFLPLIIFVFLLIDTAICRHHHRHSHHHHQQNEQPEMISVPLRRMDTVRARLALTGSLEQFRKHRTESLRRTVERMNNNYNNNEEYSSAESDQEQMEMAQNGARVGTEIDELLRNYMDAQYYGDISIGSPAQNFTVIFDTGSSNLWVPSKKCPIYDIACSLHHKYDGAKSTSYQPDGRKVAIQYGTGSMKGFVSKDIVCMANICVQKQEFTEATSGPGLTFVAAKFDGILGMGFSEISVQKLPTVFDNMVTQQKVPEPVFAFWLNRDPTSEFGGEITIGGTDQRRFVAPITYTPVTHKAYWQFKMDSISGGNGKLACQNGCQAIADTGTSLLAGPKNDIEKIQKHIGAIPLFHGEYMISCERIPTLPDVTINIGGQAYTLKGQDYVLKMT

SEQ ID NO: 169061 - protein, 262 aa, Heterodera glycines
MRLSLSRFASTVAMFAGGPIERPLAYYSQFRPASLTMHQYLDFGRKGSAFTSYHFLKTELLVRMANIMQEFDLLPAKLMQTPSARHVGSWYKQSFSELLHFEGLEPSDMVLDKFNNQLRTILHRHNTVVETMAEALLELKESHGVDIACERNIQYFLDRFYLNRISIRMLQNQHLAIFAAACDTNGTNNQSRKTVVVDPAGHVGHIDPQCNVRDILLDAYENARFLSEQHFCVSPMLDLRCFNTRIPDQQISVPLVPLHLYY

SEQ ID NO: 169062 - protein, 442 aa, Heterodera glycines
IEQPISRHLRRLVTSITLFFTIILLVVYVPVRVIKWLCPSTLPYVFSGSADTPLVEYSFELVLLQVIMPSILEYSKAFSLLKRTVRIWCRVVGGWLSLDSYLLPADKEKRNGGQQHREQQRQRARERAQLHREQRNLGAQHQALLRFRDSSVPEEYVQPNLFPLRISLLLFFVALPTIAISLLFFLIPVTIGRFLLSTLALTNQPIHDLYTIAVGLYACWICVRLGLLSREWARRGWTYVKKLFNATVFLLVRVFAAAFPLLAVIPFMLGLYFQMLVISPLRVAIFQSPLFFPWKEWAMGVVHFKIVCASVLMGPDWWLKTAFEQVQQRTCAGLSLFVFIIYADGIWNIRLRDLYTNLVFPIVNTLTFLIAFPYVLSNFLLFFVDASREEQIIVIRFAYPFLLGSICFCALITWQWQKLKLLAQKIRNDKVLCFATLIMNIG

SEQ ID NO: 169063 - protein, 160 aa, Heterodera glycines
MLSWDPAAFSGLRQIVVPRADVWLPKLFIYNSMDTKEMLADNYFDVRLTHQGKLKINIPHYVTCICRLDIALFPFDTQFCAIAQASPLLGVEEMDVNVTMPPKDSYFSGNAEWELFNVSVRDTKFWEDGERRVEVHYVMHMRRRPVYYLTVIVAPTFLIS

SEQ ID NO: 169064 - protein, 150 aa, Heterodera glycines
MIASNSAGAPYRGDPMASAALGFSNFVNGALIRHPFVVLRRQCQVHDHATRKHLTPISLLPVVVNLAGKDGTFSLWKGAIGSGVLWVVSHASEFLIAQLFNLPKSFVPQGSSERFWRHVFLKTASFLACTPFIGSSFIETVRSGGRLSDE

SEQ ID NO: 169065 - protein, 63 aa, Heterodera glycines
GNSTLLILCVSNWKEAGFEELLAKNIERSGYTVPRKIQSRTIPLIMDGLYWISCLLIDLSAIL

SEQ ID NO: 169066 - protein, 66 aa, Heterodera glycines
SIPNWRIGGNLFGDGPILMESKNPMEICQGKITKEQLRFGYEALGRIERHVQKGTFGRDFVEAMNE

SEQ ID NO: 169067 - protein, 169 aa, Heterodera glycines
ECFLTKAPLCPEMSMEQQDGLWPLSSTDRCQSRANCNAIGENGGLVTLSGEETDESQCTTPTETLSPIVRRKTTDSKEGTKIREEKRAVEGTHGNVKVTDGIMLEKRGTQRATERQNNDERETDNRAPLDSPRSQNQHCTDVLIPTSNPIFAPCARPFFHNKMPILRPN

SEQ ID NO: 169068 - protein, 73 aa, Heterodera glycines; identical to SEQ ID NO: 166506

SEQ ID NO: 169069 - protein, 154 aa, Heterodera glycines
PNYNRNQYFKSIIDSLSQKGLLEANRQPPISHSTLSFLMERKKDPMSMVNIYCSASGEPNFEFFVFQLAVRPSKFVFIFELRSRPVYGFCAASKKEAKKACALRLLDILMTEERLECVNLSGRKVRKMPPKPIPTKAANVEQSQQQENMHLSFS

SEQ ID NO: 169070 - protein, 158 aa, Heterodera glycines
KTTAPMTPTTTALTTSAGSPFAFGSSASTTASPGATTTTASATLPLLFGTQQKTTAPAAVPSSVPAFSFGTAKFPSFGSSAAGGTLFGSTTANTLTTSSQPHVNGGSRKRSAAQSVDDISPYGKRTASSSLTETSSIANAPLFGGALTMTTKPNTAID

SEQ ID NO: 169071 - protein, 230 aa, Heterodera glycines; identical to SEQ ID NO: 139868

SEQ ID NO: 169072 - protein, 55 aa, Heterodera glycines
FNYSTKFLKFYWLPALPDSEILLNQIYQNVKLIPSLPSKNYFLNNELKNLVTPKG

SEQ ID NO: 169073 - protein, 76 aa, Heterodera glycines
FFQNCSFQILKMVLLTEKIAKILNCRVSELRDRLNHPSDCETVVKALTGHRVKTTYKDRNGYTKSFAFGGITAQGA

SEQ ID NO: 169074 - protein, 250 aa, Heterodera glycines
  unsure (1)..(250): unsure at all Xaa locations
MSARIQHEAFFEHFGIVLDNAEGVYFSGQEIAGKVVIECREPRRISELLLEVKGRARTHWTKSRKMCSENETYFCEQFNTEYTRKLPKTEAENDAGGETPREGGRTVAERRRESIKMMGRLLHVGTHEIPFSYALPKSLPSSFEGEFGFVRYTCRAICESPWDFDTVCFLPFTVIGIEDLNXRGRGSVSAEFRLAKGGLTPGENVPMNAKVRNQSGRTLRGLELRLSKDVVYKSKTFAGAEQRRTTKNVV

SEQ ID NO: 169075 - protein, 505 aa, Heterodera glycines
  unsure (1)..(505): unsure at all Xaa locations
MTNFGFPPSPTFHTVRLREGGTITVFRDVANDEFRRRRPSEFAAQIAESKSAKDDCRPFFVMNIDCAVALLELWAQFLPRVQPFYALNCNADPMLLRLMASHQSVGFSCSSGAEMLNALHYVSADRVFGAFPCWTRSALRQAETCGVYTLCFDSERDLDRILANHSNARLLLRICVDPCATDANALFGAPLDEAVELLKLCVQLGLNCIGISLSTGPSTDDNCNLSSSSLFHFSSVYAFAIECSARLFRIAIDLGLRMDVLNIGDAFACPWSSXSTETDESLAHFAEFCTEFNRSFDVHFPSDGIGHGLRIMATPGQFFARSPFSWVTNVIGKRSTDASAVTNNDFDAGKTAFHYQTNESYYGTFGCRMMVNTEPRCAPLFNDFDMDTEQNQCFYYGTVFGQSGFDDGSDTDIVQSVCHFRQLNIGDWLIWSNMGAYSFGNCGSLDDEINDDDDSDGNEFDTLKTPPIFYFASQGNWESVCHKFDFAFLDEHQQQRRAGPLFASS

SEQ ID NO: 169076 - protein, 100 aa, Heterodera glycines
KIIGFGISKIVKNERMLIKPSLCQVARDPSGLVFRILIFKKAHFSIFGLGPNDPGAQKRGPKLPRGPKTGAQTRGAKNEGPYALVPNKTPLSARIQKGKK

SEQ ID NO: 169077 - protein, 306 aa, Heterodera glycines
NANSSGKPTRGRPTLPCGSCGKIDHWRSDCSFKDATCFKCNKKGHISTICRSKKKMAPPNSHRSFHSVKVDANCLHVGTTQGRWWKLCILINGRQTSMNGDTGAQATIISLQTWRELGEPELTPSDIDAKNCNDQPFALLGKFQCTVQFADKPPQILIAYVSGEVGHNLLGLPWIEALEIIPRQILFPSSKSADQATMIENFSAVKPPNKSINNVSTLKAVLQKDFPEVFEEGLGHCSKAKAHLILRSDAKRVFCRARPIPHGAMEAVNAELDRLLQIGAIKPIDFSHWAAPILAVKKKNGKTRVC

SEQ ID NO: 169078 - protein, 102 aa, Heterodera glycines
  unsure (1)..(102): unsure at all Xaa locations
VQKDLKRDAKLNYPLEISSVIIEIEYLLHNLERWXQPLNVEKTFTTLLDSPQIVREPKGVVLLIGPWNYPLNTLLMPLVDVLAAGNTAILKPSEVAVEHRRR

SEQ ID NO: 169079 - protein, 247 aa, Heterodera glycines
MPKQTQNDPMAGAGADLLRDGSDLFSPSGTFNSSLNESTSPIGGSTSSKMSSSFNQSSSYNRTFERKVIEESTPTMTTRMFTSSPLNTIKTTLGSGFPSDLGGLGTGTGTTFVQPHNYQFGTATSGSFHSSDDSLSVSMDCAMFAPEELKVSVVGNQIVVEGKHGEKQDSLGSIERQFVRKFAMPRNATADSVNSNLTSDGMLTVTASAPKAKDNSPIRTIPVKIVTTSAGGQTPQEWGRPISTKWQ

SEQ ID NO: 169080 - protein, 208 aa, Heterodera glycines
MHFVLIAFCIVWQLVVANNVEQPANRAKRFTSFGSLSTIGGRVGCVVSKNKLFVNGHFTKDLSEDEQEELKQYQEQLDQFKSEVKTYLEERQKQFRNQVARQGGAEAKEGGTQLKKPEPPKKPSFCSDKATTQYVFDGCSVQGDNVYIGDTFVRKLSPDEQKELAQFDQKFTAYQKAVTAGFRKQVEEMFGQHFGRPVRRLRYEPIGC

SEQ ID NO: 169081 - protein, 42 aa, Heterodera glycines
CNLRFFLEFLEIFTKKLQKVRLKFVFPGDVMFRRNAFQQQHL

SEQ ID NO: 169082 - protein, 157 aa, Heterodera glycines
MLERLPSQLVSRSASFVQTRMTANTVNFFMRRTGDTLWKTVTNVSMGGMKRGRARTRQPIRPLPQFYRVGMLKSSPMRIRYPGLNAPIVPQSVAELASRPFFVEEQSEQEREEVLHFVRTQVAKKSSQKRHLCKERLTPLERGFSGGTFMGQRMGPP

SEQ ID NO: 169083 - protein, 182 aa, Heterodera glycines
MDKQTFGGDSSANSAAEDKMSGCCSEHIVEIEWKHFDYLSALSGLYTASVERRKCNLLVLVQGNLDNLEGKMVILTIHDVGKNHLSFVDFVNSLSMAPLRGRSLFLHICVPGQEPEAPIFAGSSFPSMDQLGHAMVQVLRHFKISHCFAMGEGAGADICCRFAVTKLFSQIGGPSSRVVQIL

SEQ ID NO: 169084 - protein, 164 aa, Heterodera glycines
MARQQLNIRRRSVVSYVGISEHGQCGYCKFTKRAHDKAKFAASTSECNASVDASTVASSTNNDGQQQANPPNAHDENANDDTNGGGDSAVFGLWAHRLTVHHYQWLANRGWRRSGRFLYKPLMGRTCCPQYTIRLDVHKFRLSRTQKRVLRTMRDFLRTDQRPK

SEQ ID NO: 169085 - protein, 286 aa, Heterodera glycines
SRHEAEVDFEDEGDYEQLNANQNRKQKKAGGWQSMGLDHSVFKGILRKGYRQPTPIQRKAIPLMCDGRDLVAMSRTGSGKTAAFVVPLLQRLKQRDARGIRALLFSPTRELALQTFKIVKELGRFTGLYCACLIGGDSMDEQFNALHQHPDILIATPGRLLHLVVEMNLKLQTVQFVVFDEADRLFELGFADQLKEILKRIPDSRQTLLFSATLPKMLVDFAKAGLSDPELVRLDVESKLSDKLSMAFALCRQVEKLPVLLNLCRVLCKQKKKTIIFCATMKHVEH

SEQ ID NO: 169086 - protein, 108 aa, Heterodera glycines; identical to SEQ ID NO: 163425

SEQ ID NO: 169087 - protein, 108 aa, Heterodera glycines
RSSLVGSGEGDAVDGVTSKWKPNRGSWSSSGDDKLRFNVPLDPIDCCCCCCWSLLPLYFSLVSSPSRFFSGFSSSVENSVIRFAFGPSLSPKFFSLCFSLSNDENLSE

SEQ ID NO: 169088 - protein, 109 aa, Heterodera glycines; identical to SEQ ID NO: 163748

SEQ ID NO: 169089 - protein, 47 aa, Heterodera glycines
FLKLHYFIFLAKLIHKYFFRNCSETHQILFISYFRHSDAFTIKKGDE

SEQ ID NO: 169090 - protein, 160 aa, Heterodera glycines
MSNFHLSSKVLNYIDTRPKENEVKGAIKLDVNLRIFIKNERSVEKEKSRKEMATNIYATLDKKEPLAAFIARIGDTLALTEEPENYALMFEEKRRFVTEYNKPSVAQGFFLLLTASPSNFAKHFLAQLGQGSCSAWPHLPLFVSLCADPAFAEAFTALNG

SEQ ID NO: 169091 - protein, 54 aa, Heterodera glycines
GFRFQTPCHESYQISIYKGTSRSVTRKMHIGYIPLDRQTSIVNFVLGVEKISRS

SEQ ID NO: 169092 - protein, 154 aa, Heterodera glycines
IAKADFMDERFSRVITANKAYNLFQAAILNGLLTHHLDFIHGKCVDLRKIGLLLDHFDRLVLRSECLLAQNANISLLRCLVKCSFYCRFADFLLCSSIYQQSFNEFRLLAMAMFCYGLALKWACHKSVKGSDGADSALLSLCAAELTTLLRTNL

SEQ ID NO: 169093 - protein, 307 aa, Heterodera glycines
MSEEKFEDVDGSIIGQKRQNTENGGPASKKANVIESDNLQIKVLIPSAAVGALIGKGGETMRNLKNDSGCRVQMSKNLEVYHGTSERICLVKGKLAATMIVMGAILEKIQEKIDANHASDHFDLKGLDRTKEMKFVVPNTSAGMVIGKNGTSIKEIRDTTTANIQIYPKAGSEEAKISAERVITVGHESNEVLLSAVQRVLEKVVADPMHAQPVPAESQLASGFEFGGSRLSAGSNQFGGISNMGNNSEAMHGKSFGGPSFKFNPLQGTGNNELLAFLDNLQSTLRSSGFNDQSVSEVMQAMQVLAK

SEQ ID NO: 169094 - protein, 97 aa, Heterodera glycines; identical to SEQ ID NO: 166453

SEQ ID NO: 169095 - protein, 159 aa, Heterodera glycines
ELAFDAGAEPAPVGQCQLSAFVRQMVDGTVRSDGLGVEHLLTDVAHVQQPGFFVQQMSFAAFMDAVVMEVRPVRCGLFQQTLWAHVKSADIAEMLVAGGRVGAVVRAVSDDAVGVMLLGLHVDKLFFRVGVLLLGHMGPNVMHKHHIVPQFLVATLECA

SEQ ID NO: 169096 - protein, 229 aa, Heterodera glycines
MRCLFALVPLSCAVLLPFFADAVPPPAAVRSARPAARQAVAAQRQPPAGMERQCKCAEIKPCKDRYQKTMEPCLDTCQSHITSLGGNFRQVKACFTPKESLLNSAMRCTERQHDNACSHSSAAQFVPKRYGQTLENEAMVEIDRMIGRMGLDKSGSMKKLVSVSKKLFGCLKQCMAKRAGNCEKQLKCGLLLPSDSAMVQKTKSCALNNGFNTATAQQTCHCVANAGVK

SEQ ID NO: 169097 - protein, 103 aa, Heterodera glycines; identical to SEQ ID NO: 163890
  unsure (1)..(103): unsure at all Xaa locations

SEQ ID NO: 169098 - protein, 71 aa, Heterodera glycines
FLPIFRFLWRAMEPIDRQFCVAIFPDRRSVKQRTVAEGGNFVEEEIVGTPPQVELIKRMFRSHFAICCSIN

SEQ ID NO: 169099 - protein, 144 aa, Heterodera glycines
MRLRLRLSPWSFRGAVPGVVWVGADEVFSVSDDHSLCRWTVSKTEANFLSNALKDSIFPTSLSAAFPFAAGRSPFSGGLSIRSGKKQQRTSAIHSSQSAGNELILMTASDGKIHLITPAGKIERTIEAHQGAAILARWSTSEPG

SEQ ID NO: 169100 - protein, 213 aa, Heterodera glycines
  unsure (1)..(213): unsure at all Xaa locations
VKQQERISFPFSVDSKRFLLLPTDFVDEKSKFFNRQFLTIYRARINCLKDLIKKNARNILASTSNNSVQIDDLSNFSAGNDIXXXGVVFKKMKFRQSILYEFSDDSNVPIKMGRKAGDNLCDDEDILQLEDDQQTVKLLGNIDKHCFVTGDVIGVIGCQEDVSDNFEVRRIIYPEMSPQLEWPLVEHDCYIVFMSGISLVGNFDNDVQTFSAL

SEQ ID NO: 169101 - protein, 110 aa, Heterodera glycines
MPKDMSERAKECKEIRKFLLNCVKRTNASATAAAPRVLYISGVPGTGKTAAVLKVQKELCSEKKTPKFDFLNINALELSDPRQLFTKVYGQVQNNCTGTRKKISARNAQQ

SEQ ID NO: 169102 - protein, 59 aa, Heterodera glycines; identical to SEQ ID NO: 166438

SEQ ID NO: 169103 - protein, 276 aa, Heterodera glycines
  unsure (1)..(276): unsure at all Xaa locations
SRIFYYHHPDLGNFHYGPQHPMKPARLAATHSLVLNYELHKHLTCVHPPKATQHDLARFHAPEYVQFLKRISPLNADQYEGLFNRFNIGEDCPVFDGIFDFCSLYTGGTLEGAIRLNHGQAEIAINWSGGLHHAKKAEASXGFCYVNDIVIGIIELLKCHPRVLYIDIDIHHGDGVQEAFNLTDRVMTVSFHRYGSYFFPGTGDMYDVGMGHGRYFSVNVPLREGMDDESYHSVFKPVIQAVVDNFNPSVIVLQCGADSLGSDRLGCFNLSFDGHG

SEQ ID NO: 169104 - protein, 208 aa, Heterodera glycines
MFRNCLLDLTPLRCAFIANKLAHYSSKTPTFSNCIPSPILSGNQLFRIIRDKIRTSGPITVAEYMQICATSQLGYYAGQNEIFGERGDFVTSPELTQIFGELIGSWVVHELEMTSWKDRWQLVELGPGSGELMADVLNVLRQFDVLQNVEVYLVESSERLVERQRETLKKKFGEDLLRTIRWYDSLDDVPQGFSVFLANEFLDALPVH

SEQ ID NO: 169105 - protein, 138 aa, Heterodera glycines
MDESAKKTLKQIPLLKTNAGPRDGPLWLERLKEEYNSLIAFIEHNKQGDADWFRLESSADGTRWFGKCWTYHNKIKYEFDVEFDVPITYPKTAPEIALPELDGKTAKMYRGGKICLSDHFKPLWARNVPKFGIAHAFS

SEQ ID NO: 169106 - protein, 152 aa, Heterodera glycines
EMMFFQLSSSAPTSSSVDGPQQFFQHHHHHHQFVPSISPLFDTSGTGMLGTLAAPTTASIFMPSLFGGCGGAAAGDGTITAAGSLMQSLLSAAVCSGAFPLVGTTVAASPLTATTSQHRKLFIGGLSHETTDEQLRDYYSKWGKVIDCIVIR

SEQ ID NO: 169107 - protein, 161 aa, Heterodera glycines
MVKLQRIPAEFGIECNVYGKCEFFNAGGSVKDRIALRMLEIAEQSGRLRAGMTVIEPTSGNTGIGLALACAVKGYHCVIVMPERMSREKELTLKALGAKIVRTKDKARYDSEQSHIGMAFKLRKETPNSVVLDQYKNIANPLTHFEGTAAEILDALDGKVD

SEQ ID NO: 169108 - protein, 193 aa, Heterodera glycines
MKASETMTNWSEQFQEYDPFITQPHPTNPWVSDDPSLWALNADNVEVPTERRVKRWGLSVMELVRDPIGRQVLESFLDSEFSSENLRFWCCIQDLKFSPNCQVKTKGQHILDEFLAPGAPCQVNVDSRTLEETLRCLEESDQALRNQRFAFSVSEEHVFTLMSKDSYPRFLRSGIYKAVLDAAQGKGWQKTDH

SEQ ID NO: 169109 - protein, 158 aa, Heterodera glycines
  unsure (1)..(158): unsure at all Xaa locations
VAVDLAAIIVEKNVNSFLSVVDIPKPSLYVYFAFLFALATILWANLLCKSDSNNIFKVHRLMLVLVFLKSLTLLFHGVNFYFVSVYGHERELWAIIYYVTHLLKGALLFGTIILIGSGYTFXKQFLSDRDRRLFIFVLPLQILANIAMIILEESEFSD

SEQ ID NO: 169110 - protein, 124 aa, Heterodera glycines; identical to SEQ ID NO: 163420

SEQ ID NO: 169111 - protein, 160 aa, Heterodera glycines
HLSTHYELDQNLFKNKTLREFCAAIHSFYGKCSTNILDHFKKRFNILQFARHLPHFFVGLNSAWIYEFVVLLETTGLNGHILDNDFEMDDNDRFIVNTQLQLLLQEAFRVSWLQNSPFHDKICVSLMRLSPTSDDRLAEHEKRLEHRLKNPPKLELNIVV

SEQ ID NO: 169112 - protein, 404 aa, Heterodera glycines
MKKWFDTNYHFIVPELSTDQSFSVGLNKPLNDFLLAKNALNLVTKPVLVGPVTFLHLSRVGERKELATEEQQKVHNLKLLPSLLPHYVKVVQSLVDAGAKWIQIDEPIFALTFAENEAPAYYDAFRQTARALQQVTAKKAHLLFATYFSSIAKNVQIVKDLPEGTGIHIDLVRAPEQLDPVLSALPANCFVSLGLVDGRNVWLSPLRQCHANALRVVQKLAPGRVLVSSSCSLLHVPYSTKFAQSLTKKPVKGMLTGPMTILKWSFVRNDQPQKDTLFQVALALRDDVAELEKEGINCIQMDEPAFREGLPLDLAQHNEYLKITVQAFKISTGCVADSTQIYSHMCYSDFGDIFTHIAELDADVLCIECSRSDLSLLSCFDRFGYPLMVGPGIYDIHSPRVPSV

SEQ ID NO: 169113 - protein, 79 aa, Heterodera glycines
HWPLMEDQQGQLRSRRAQTQQTETTVEGPTDNRNGRTGGEETTARTHRNGGPNEASFHGYVTSFRIYVQNFKIRFFEYY

SEQ ID NO: 169114 - protein, 70 aa, Heterodera glycines
MSDHPNVALADLSCVANDVWLDTLFWIDRVEVGTKFALIDARFGKLVATHFNLRKWRLGELGVHRAPSGW

SEQ ID NO: 169115 - protein, 172 aa, Heterodera glycines
  unsure (1)..(172): unsure at all Xaa locations
DRAHRQEQQQEKFYSQQQMSEESEEALFCISKHDVKEISQVVKAMAFRDHCTLYVSNEGIRLAVDDQHNQQGSAYFRSEHFQDFNFRTQTCSIKIPMRPLMEALNMFSGTMTMVQISWNGEGFPLLVILEDEGXGVVVHTEIRTLIAPEILEFDFDNENVTAKAILNSLPIR

SEQ ID NO: 169116 - protein, 83 aa, Heterodera glycines
  unsure (1)..(83): unsure at all Xaa locations
MAETFSLLSPTHLLNETSLNLRCPYCPKKFLKNTEAISHMDPCLKXRPYPCTNCSRRFKSAQNLSQHERIHTNVRPYNCQEPK

SEQ ID NO: 169117 - protein, 125 aa, Heterodera glycines; identical to SEQ ID NO: 162470

SEQ ID NO: 169118 - protein, 131 aa, Heterodera glycines
EEKTIIERKDGEGLRLLRCLLDDPNISSVDLSTLSVPKAVSLSAIGKSIETANAYKQKLLKADKDQEVTRVNDLQADYFSLEHNPYLTAAEREAIGNRKEELRQLSLSVKRNILVDLDISTGAMHQQKQKT

SEQ ID NO: 169119 - protein, 133 aa, Heterodera glycines
  unsure (1)..(133): unsure at all Xaa locations
AAVIEQQLGQFSTDKETTHKELSVGVNYVQTQGEQHLAKAQEAFDRYGEKSQQLSDIAGESKXLSDRQEQRRREILSLAEQIRKESRQSLSDANEAIFGASSTSLQISALLTEVHELEQRLKAVQQMATEQSL

SEQ ID NO: 169120 - protein, 166 aa, Heterodera glycines
MSEFTSSDGSGKSVSSKVSESESYDATTLGKLMNLDAKVVEWLEKEPYTDEDPLLVLDFLGPFNNLHGDYNQNKAFLVQKLVAAGGARIAANVDNVIKFATWDMFYEARRILQADLEVRHFFYHPNPAMALQLNINQFPIVSTTVVTFWSDESLKLKTQPYQFFEI

SEQ ID NO: 169121 - protein, 166 aa, Heterodera glycines
MSEFTSSDGSGKSVSSKVSESESYDATTLGKLMNLDAKVVEWLEKEPYTDDDPLLVLDFLGPFNNLHGDYNQNKAFLVQKLVAAGGARIAANVDNVIKFATWDMFFEARRILQADMEVRHFFYNPNPAIALQNNINQFPIVSTTVVTFWSDDSQKLKTQPCQFFEF

SEQ ID NO: 169122 - protein, 284 aa, Heterodera glycines
LKPEQVTVQNLLIENGQLIETVAEYQRMGKIVEATKYQERLHRNLIYLAKLADSTCSSHLLLEIGGAIPPTNESPPPAEPLLTVTNSANPPNIVATIANAGLPHQQQCQPAVSVAIVSQTSPPSGHAQQRGISTTPPAHGVQYQFPSLPQPSPHTQTTQQQQPTTANLHYSQSHQQQANVQLSQQQQQMGTQQHSVVYAGGHAMPTQHHQQYSAAYPLLQQQQQSQQFPPSTGAAFAPMVIPLQNDPIAVGIRQQHQQVYQHTPSHSALQHGTSHAGGYLAQQK

SEQ ID NO: 169123 - protein, 146 aa, Heterodera glycines
MNICASKCCLASPIAHRSHSVAFPPFVRRFASHGHDDNKPHPIDDPDIPRQPDMYRPGSDSFAYENPWPMLNKGRLDWLFNDGWRRPLAADQGAHMRRQWIYFKCIPRDEHKDWKKWHGTMPIFGTGCFVMLTFVWQYCNSDWPSA

SEQ ID NO: 169124 - protein, 107 aa, Heterodera glycines
LSFVERTVQSLLDKKMIVRQEIDMFEATQIGSATFNANFNPQMALDMCNDLGANLGKGIVLISHFHLLYNCVPLDVAVQVDWNLFYNEVIFGAEQRGAAANSFDGFV

SEQ ID NO: 169125 - protein, 108 aa, Heterodera glycines; identical to SEQ ID NO: 147910

SEQ ID NO: 169126 - protein, 98 aa, Heterodera glycines
KIKRQFKQLISLLIFVLFQPKHAAAPAIKITDEANNVYSVCVERDVLPAPENASKDKLKAIAAKCDECGAAKCKAKCGGKEVNDACRTCIMQNCPPAK

SEQ ID NO: 169127 - protein, 111 aa, Heterodera glycines; identical to SEQ ID NO: 163411

SEQ ID NO: 169128 - protein, 197 aa, Heterodera glycines
MASNSNAQLLDACEKGAELKNIKSLIERGANVNFADKDGLSPLMGACVFGNVEIAHCLVELGATIEQKDDEGLTALGHAVIAGQLESVKMLTGKNANCLVFAKDNRSPLVIACQEGRMEILSHFRSVGVNLNHCDEHGITPLMVATQKKRVDVVCFLLQNGADKSQTDAKGRTALAFADDLRDSKERNQLLKLLSDR

SEQ ID NO: 169129 - protein, 235 aa, Heterodera glycines
AQIGIIKIPEKYFCVRSVELFDECLFGFVPMAAVDNVQKGPIQHTLELKGGVKLFVGNWQQNRRRNRQMVKSRKGMLKETRLNTVVERIRHTTSKRLPPTAMEQSRTAKAKAGGWTTIGNFDVGTLQLAGGKRLVQHLLNRCALPAVHAQLKLQQPMVEAEHRRRTVIVGALSRFICAIARLLLVFFPVKPKEQFHRKQNQRGGVHFAWHWKPFAVGPSKFQCFPRWCRVRVAFD

SEQ ID NO: 169130 - protein, 208 aa, Heterodera glycines
LTDAGQLVALTGASGVDRTTLFNTLLNRNLKSLSVEGQLLINAHSLGQFINYASGVFGSSFVVSNILRVLSGFPIVFRIQMADRRRYTPTERMRDMQQNINELIRINRVNAETIQSQAETIRILMGLPGVRQMYDEHQANANQNANQNANQNAPIQNIQYAQPLQIAQAGNFQNLNQLPNLQQNQQQYGQYPFVPTPLGYPPAPQGNP

SEQ ID NO: 169131 - protein, 80 aa, Heterodera glycines; identical to SEQ ID NO: 166423

SEQ ID NO: 169132 - protein, 229 aa, Heterodera glycines; identical to SEQ ID NO: 163409

SEQ ID NO: 169133 - protein, 265 aa, Heterodera glycines
MAATIASHAPQMKQQNVQVAEEETFGKTNGGMPNGAQKQQNGQAKEKQKVGQTAPVARPLTVKDWDYDERGQCGPKHWLRIAKCEHLGDHQSPIDFQLSKMRVHPLNIHPLCLVNFKKPLAGQLINTGCGIQFQPDPQIEPPEIYGGLLDQNYRFVQYHFHWAQNDNEGSEHTIGGLRYPAELHLVHYGVKNPSKLAVLGIFLKLDNESENGEKKKFVFSAEEMEALKKVIEFEQNAAIDTEHSLSSKLPPNCCQEMASSAEHFV

SEQ ID NO: 169134 - protein, 155 aa, Heterodera glycines
  unsure (1)..(155): unsure at all Xaa locations
MGFSTKPIIIDGKDHLLGRLAAVTSKQLLLGQKIVIVRCESINISGNFHRSKLKFLAFLRKRCNVKPSRGPFHYRAPSRIFWRTVRGMLPHKTARGMEALKKVKCFDGCPQPYDTKKKFVXPISLRHIGLKXGPNYCHXVGRLPPESWWAISRPF

SEQ ID NO: 169135 - protein, 91 aa, Heterodera glycines
LKENGIDRSHQRSGKSGSLEPEQFRKLFIGGLSLNTTDESLHAFYSQFGMLVDCIVMRDAQTKRSRGFGFVSFQTADEVDAAMSARPHTID

SEQ ID NO: 169136 - protein, 136 aa, Heterodera glycines
MLQQQSSNNFHHHHHHNLHHQQQLSSSSTFSTSPSAKVPMPPPPLPPPPPFIRRPVVMPTENLSPSNNAPLTNGRGVTSPKKSSSSALRLSFFNGSPLNFFNNSKVVAEKSVPAPPISPPPKAMPSAAETNGLSNG

SEQ ID NO: 169137 - protein, 160 aa, Heterodera glycines
VQLRSFSAVGRFVKTHKFKNGAQKPPRTAAKKPISGTAREHSAMLCADASRERAVEARVAQGTRAPYVHYQRVQTAVGAVQPFGGLPARGCGQRRGRTVGTTATVPVITVERQWCVCPVVIRSRNGIGHGTDSYGSGRDTVNNGTGGEQSTQTNYNGTAG

SEQ ID NO: 169138 - protein, 131 aa, Heterodera glycines
LPKMPVRQILSGTRRIATKSLSFGIGSARLADYGVFKALLEPLVVSKFEELSRIRVEKITIFFGILVFVSLADVAMTLRTNEHVGDVERRLESRLEDRFADLRALLERRLDSIDRHLGTSDKATDAKLPGQ

SEQ ID NO: 169139 - protein, 115 aa, Heterodera glycines; identical to SEQ ID NO: 163145

SEQ ID NO: 169140 - protein, 106 aa, Heterodera glycines
SEEGGRIVNVSSSVHLHADSVDPEVVESPRRFGIIATYARSKLANVMHVVALTKRIRTNDSGSKVSANACHPGSVNTELIRNNFFRKYIKKAFAPIIWFVLVSISA

SEQ ID NO: 169141 - protein, 91 aa, Heterodera glycines
LISSQKSCQLKTAKKAEFSKFFISIFFYSSKFSVIFSRLIEPVKSFRMISRLFDSVNNFKSYIDSKLAGRSWPVPRSAVLVFQIFQRFLFF

SEQ ID NO: 169142 - protein, 51 aa, Heterodera glycines; identical to SEQ ID NO: 166533

SEQ ID NO: 169143 - protein, 210 aa, Heterodera glycines
THSLLRRCASHVTSAAIIWCMLGWTMRWGRMPRYRSIGGDANSNWFGGDGAILRTDQQCSARQRLNASAMAKISLRKQCSSFLCCYTQCSTDAPQKCHDDNDAQKAFDAVHLRSLNCFFSSFCPPFRHFLPPKVLLRLCLLFLFAVGGCPIVPGGVSATARSRRTLVPLGMDKQMFPPQIFDENAPICTAEREPCGFYSFSLDGKAPLKW

SEQ ID NO: 169144 - protein, 68 aa, Heterodera glycines
ICVDGRTHFWSIEYREYVDAYARIYRITLIYHSHVDNVRIKNKYVLMDVRISGALNIVSMWIRTHAST

SEQ ID NO: 169145 - protein, 55 aa, Heterodera glycines
IFSENSNNMLLMVFEALSTNPASLLANFESRTRIRTSGKLKISTFENIDSAQRIS

SEQ ID NO: 169146 - protein, 214 aa, Heterodera glycines
MDPYLQELINKWLCWDKNETTRTEIERLVKENNVHELRLRMVGKLSFGTAGVRTHMEAGFARLNELTIIQLSHGMARYLTSEMGEDGKKKGVVIGFDGRHQSKRFAELAANVFVLNGLSAFLFSAVVPTPVVSFAVVSLGCAAGIMITASHNPKEDNGFKAYWANGAQILSPHDTEICRIVAEESKPEEAYWDTVQLGTSAFLHSADSVLEKYF

SEQ ID NO: 169147 - protein, 207 aa, Heterodera glycines
FHRRHPPQFPSHSIDGTQMARTALSGSATRQRSITDNSNSNCFAVDAAILGTEQQCSARQRMNASAMAKISLQKQCFPPECCYTQCSTDAPQKCHDDNDAQKAFDAVHLRSLNCFFSSFCPPFRHFLPPKVLLRLCLLFLFAVGGCPIVPGGVSATARSRRTLVPLGMDKQMFPPQIFDENAPICTAEREPCGFYSFSLDGKAPLKW

SEQ ID NO: 169148 - protein, 142 aa, Heterodera glycines
MSSPSAGKRRMDTDVLKLIESNHEVVITGGLNEFLVKFYGPKGTAYEGGVWRVRVDLPEKYPFKSPSIGFMNRIYHPNIDEASGTVCLDVINQSWTALYDLSNIFESFLPQLLTYPNPADPLNGEAASLYMHKPDEFKAKCM

SEQ ID NO: 169149 - protein, 202 aa, Heterodera glycines
  unsure (1)..(202): unsure at all Xaa locations
MSALPSPLLAFATSIRFCTSTRQNLKINQNTKVVVQGFTGKQGTFHGQQMIEYGTNVVAGVSPSKAGTEHLGXPIFATVKDARKKTGADASVIYVPAPFAAAAIDEAIDAEIPLVVCITEGIPQLDMVRVKNRLLKQNRTQLLGPNCPGIIAPGECKIGIMPGHIHEKGVIGIVSRSGTLTYEAVQQTTETGLGQTLCVGIG

SEQ ID NO: 169150 - protein, 98 aa, Heterodera glycines; identical to SEQ ID NO: 162993

SEQ ID NO: 169151 - protein, 217 aa, Heterodera glycines
ATAAARGLTAAGRRGRRGVAADAELDRATAAGGRRAPAATAAAPVTAARRGRWRGFWAFAANCQLNGTAAAAAAICTITATTTSAAAAAPATAARRGRRRAWGVAANCQFNGTAAATAATSAATAATAAARRLTTAARRGRWRARRVAADAELDRATAAGRRRAPAATALPTETCRVGRNLKAGEKRMGKGRDEKEEKRTFANEGHLDKGKHKLGGK

SEQ ID NO: 169152 - protein, 279 aa, Heterodera glycines
AFQNPGPGTGTALLAVCLTLPMLKSYVSNVGMKMDSELSSCQHNAKDIWSEVSQLKGLPLLVFCNRTARSAYGSCQECCSGGAQGQPGQPGQPGRPGNPGAPGSPGQPGQTPQTPCEQVHPPPCTPCPGGQPGNNGPPGPPGAPGAPGQPGTGGGQPQPGEPGPPGPNGQPGQPGQPGAPGQPGQPASPPPTEPAPAGPPGEAGAPGQPGQPGAPGQPGAAGQPGPKGPPGGPGQPGNGGAPGQPGQPGQPGNPGERGICPKYCAVDGGVFFEDGTRRR

SEQ ID NO: 169153 - protein, 224 aa, Heterodera glycines
CVYCIMLYCNEPFTVMWLITVIIDWSLLSLLDENRPFSLGWPQSIGQLAVGVLTGATAAATEAGKRPRNASAKALRAETPAGGHETDNWPTDGLSDGQSADGGQSEGRKSAKDEDVSLASVGVSKFVVVWACLFVPSSVCGIFPILASTRSPMARAWEGLHAGGKADIGGRGEAAEEKRLLFSICAGGSVGSARAPFTGFSRRTNSEFPTHKRRNKSPTEKSNR

SEQ ID NO: 169154 - protein, 157 aa, Heterodera glycines
WKLRRPTAVCQLRGHDEHVITCLKLRGDLIVTGSDDCTLRVWSAATGTCVHVLNGHIGGVWALQLSQDGKIAVSGSIKVWDIVAGQCIRTLFGHVAAVRCVKFDGSVIVSGAYDNNIHVWNAADGSLMHVLEGHTNRVYSIHFVSERKLLISGSLDT

SEQ ID NO: 169155 - protein, 279 aa, Heterodera glycines
MPGIKRLFDGILRFRKTLRPSMVKEFEKVRDHPDPSAMLFTCMDSRLQPSKFMGAQIGELFVVRNSANMVPVAKSFGDSGGEVSVTTEPAALELAIRRGNVRRVVICGHSDCKAINTLYDLYHGRPFDAESPMDHWLRRNGHQSVQKLTQLLMAGPGTELEFASENGLMAFCAHIDRTDQLSAVDKLSQINTLQQLTNIASHEFLREYIVTKKVGLDAMWFDIFNGEIYIFSRMQKLFLPIDEKTSADLLREAIGQIEEENENGGEKRRECRKERHGRT

SEQ ID NO: 169156 - protein, 482 aa, Heterodera glycines
  unsure (1)..(482): unsure at all Xaa locations
ALQQVTAKKAHLLFATYFSSIAKNVQIVKDLPEGTGIHIDLVRAPEQLDPVLSALPANCFVSLGLVDGRNVWLSPLRQSCQCVARCAKIGXGRVLVSSSCSLLHVPYSTKTEKRSAEMPKTVATGMASSKIIHWLSFGIEKCEQLVTVAKMINGGDCAKELAENDALLKDHSVSPLIHNGTVKERVTAIEASGVESYFRKSPYEQRIVQQKACLQLPPLPTTTIGSFPQSATVRAMRAKFKAHKMADADYWAFINAETERCIRMQEDIGLDVLVHGEFERNDMVEYFAEHLHGFCVTSNGWVQSYGSRCVKPPVLYGDVQRAGPMTVAMTKFAQSLTKKPVKGMLTGPMTILKWSFVRNDQPQKDTLFQVALALRDDVAELEKEGINCIQMDEPAFREGLPLDPAQHNEYLKITVQAFKISTGCVADSTQIYSHMCYSDFGDIFTHIAELDADVLCIECSRSDLSLLSCFDRFGYPLMVGPG

SEQ ID NO: 169157 - protein, 276 aa, Heterodera glycines
DKLLVCYLEDVKNALYVHSLDDGRELYKLPLPIGSVGGVFAEKSKSKIFVGFESFLVPFILFHGDFSKCPSRESPLQLTETRRVNVPGLDCDAFDSKQVFYPRDDGTKIPMFIVHRKGVKLDGSNPAILNGYGGFNIAQTPYFSVTRLMLAKHFGIVSVIANIRGGSEYGEKWHEAGMLGRKQNVFDDFIAAAEFLISEKYTNNTKLAIHGGSNGGLLTAVCSQQRPDLFGAVVTRVGVLDMFRFNKFTVGAAWTTEYGDPDKPDDFSFIRMYSPL

SEQ ID NO: 169158 - protein, 261 aa, Heterodera glycines; identical to SEQ ID NO: 162427

SEQ ID NO: 169159 - protein, 158 aa, Heterodera glycines
FLTQITCRAKSQAHSMPAFWCHKCRSRCIALERYEDGVRCGRCHEGFIEEIDDIQEDHSQRSASDSPQQTPPPLVLQGHENPFGAFPGSPFARLFQLIHNNIFPTTTAAAGNDGRPTVLIHRRSASEGPSTATHQPQHRQAAATPPPVPMDQQPHTQR

SEQ ID NO: 169160 - protein, 197 aa, Heterodera glycines
MPSSVGPSSSSDLLIRLFLLLDSAVHFALGAFLFFCPSTCAHFLLKRPSSDGVHWHLLRCVGGQLMASATLSWRCASPRRLPELRSSCLMLRLLGSVLFVFLFLHIRAVHPDLMPFLVLRQLIWFCFSMIALCVALLIVSGWPIGDKLFAANRWGNVLYQIDTIASISIGMAWVMAPQWLLHRQVRVPMDQSHEFCG

SEQ ID NO: 169161 - protein, 76 aa, Heterodera glycines; identical to SEQ ID NO: 166401

SEQ ID NO: 169162 - protein, 78 aa, Heterodera glycines; identical to SEQ ID NO: 152412

SEQ ID NO: 169163 - protein, 127 aa, Heterodera glycines
MKRTLRKIWICNDVLMDILPFFDHAQLGLKLALISPHFDALVDTHFDGKSDLTIWRRITIWGFGEPKIIVERKSEEFPLPDRPLPSKIHFKDLHIRNICSPVCEFLRSNRHIFDKGINLRLDMDLPA

SEQ ID NO: 169164 - protein, 299 aa, Heterodera glycines
HIETHSNGGASVLRCDWRRLKHDLSSQELNEFAEEFIDLGLSELSKVPLFVMCVVEHGIEYLEDLLEYLGTKHSNMPVKMGSLHNKQLVETIQIGHYYEKVISSYKQGTYRCGPLKEITLVGKKQEECGAYFEHLIERLEECPFLRILLPWSERTICSDKRPSESDDGPIYWCRPGEQLIRTDESKFDEIKSKQHRRGSAGTKQTKSAGIPLKALERREILFEDRTPCHADHVTDENKAHTTAAVGLLQAVRSPTEKGKIGDRLVKDVICFHAADFKRVTDILKLDLYEPPMSQCTQWV

SEQ ID NO: 169165 - protein, 78 aa, Heterodera glycines; identical to SEQ ID NO: 166396

SEQ ID NO: 169166 - protein, 141 aa, Heterodera glycines
MSHHTQIQQYFCPPSAPAVTYYNYGNITNIDLSPQQAVPQGFQQQVQLTAPAYTVAQYWHNVPSQNGGYQMPQNNGHHAAAYSSGDHPKMGKHKGIGKRFHPQKHQQRASAPHGIRRNGKYSAGATTKQQQANADDTDHQP

SEQ ID NO: 169167 - protein, 131 aa, Heterodera glycines
IFLFSITFYFIFVDKILFSQAFPCHSSIPFIICFFRFCLRIHAQVGGCWPSSKSLSAFNVSSWHSIFFCAGKQSRREEPIGSSVKHLSWFSMPKYFGGNAATPPTHLSTQPMSKRTQKTNGKLKKDFIFYQ

SEQ ID NO: 169168 - protein, 72 aa, Heterodera glycines
RINRTKTAWEDAVRSRSNENDKRQLLESIRDRLQNVFEETLKHKAVIEKLEERDKRMGNMLESVDNIENLRK

SEQ ID NO: 169169 - protein, 148 aa, Heterodera glycines
WIPRAAVIRHEGDILIKRGYAFVELDDPRDADDAVYDLNGRSMMGMRVVVEIAKSRPWRSGDSWSSRRRSRSRSRSRGKRSRSRSRSRDRKRRSRSRSLRRRSRSPKRSRSRSVASRSASPPEPKKARHTPSRSRSPDNKRLRSASPR

SEQ ID NO: 169170 - protein, 140 aa, Heterodera glycines
PRGLNAARSLSNRRRDQRWADKQYKKRALGTAFKSSPFAGASHAKGIVLEKIGVEAKQPNSAIRKCVRVQLIKNGKKITAFVPNDGCLNYIDENDEVLVAGFGRKGRAVGDIPGVRFKVVKVSGVSLLALYKEKKEKPRS

SEQ ID NO: 169171 - protein, 66 aa, Heterodera glycines
KRVGFKEPHTGLVKNDFFGYWYLQYCLVTGLYMLEPWERKMFNVFVTGFIAVLCSAFYALWNALIN

SEQ ID NO: 169172 - protein, 392 aa, Heterodera glycines
  unsure (1)..(392): unsure at all Xaa locations
MVISQIAKTLWSHXKKSIFAVIATAYGANALRARLRDDRIRYSFAERARKYGLVSFGPAQRLRRVTVLVNRESGGRRAADLFLRNALPLLNLAGLQVNVVEVSSASELESLCRVLDNSEADCIFLVGGDGTLSRALVGLSQNSAPLPIGLFPGGRKNIAFWRIFQSKNQNRDSMDLNDQDSKSVRMFCESAMALIEGENRLVYPVKCSIAEEMNDSPSDHQTVNTPNTFWLLSDLCAGWFEHCEQKAPKLWWWGPLRYKFVYFWEFLKRKPIPLDLRISYEEFCPGCNRCVTPVKQKNLTTLWSFFSHLLWSSPPDSTKIKVNSDFALVENPNCGQRREANVSGANVRLNVEQTENGSKLKLRVGGAGDAFGRWAAMRFGWNSVGVANGESK

SEQ ID NO: 169173 - protein, 201 aa, Heterodera glycines
MLDQTPSTSSTAVTYANLSIDDRDTLMKNLQKLFKTHHQEQNVTNDQQPGSSTSKGTDSRTMKTAARGQTEFPFFTPRDSRYSTLKSTVVDGKALGCFIIGGECRLSFPQMRALCLGEIPTQKIDESMKLLAIVNALATEDQLTVLKRAGLGQPSLSKCELITKTNAERLISLLNSTGTSPIDEVQRSQLHSFRVVHDCFG

SEQ ID NO: 169174 - protein, 152 aa, Heterodera glycines
LSCANNNFRLNICCRRCCNCCCSSPATSSSSPPFPSRRCSSMPSSPPPVESSQRCCAVAAGAPGISAAAASSSASTSLSSTTALLLLMSCCCWCWFCWEMLSAAGSRENEVCCLINRWKRSGALCPQTLVPNSCSPGDPLVGERPPPRGAPA

SEQ ID NO: 169175 - protein, 159 aa, Heterodera glycines
AQAQAQAQAPQPTMSSTLPTSSSTGTTTSAAPLPAALLADLTSAIPHSPPPPVTPATLLATRISQPFYASVSTTRRSGTTAAHALALSHVSETAQFVVGYTSRNAPILNDLKGSNAAEVLLSSPPPGTSLARGQVPKVIRIEAKCYLACSPQLLMRFPP

SEQ ID NO: 169176 - protein, 172 aa, Heterodera glycines
  unsure (1)..(172): unsure at all Xaa locations
MDVDGAAQDEMVTDGPGYIANCPTGSMAQQSSNNGGGSSTSSSSGGGNGAGGNSAVGSSHQQYRSMSPLSGLGMAAASSASGTSSTSSSSSSSSSSVIPLDIGLGMLPIAENWCNTQVKVVKFNYMWTINNFSFCREEMGEVLKSSTFSAGXETKLKRCLGIKPKGLEQESK

SEQ ID NO: 169177 - protein, 97 aa, Heterodera glycines
ASVFYYQFHPTFPNQQINSFLPFFALLLRFTLSSSPKWAKLVLCSPHFRPFFLCSSVFPFLFFSTDLSRCPFASPPFCWANTQSEPFSRARNVSYSN

SEQ ID NO: 169178 - protein, 158 aa, Heterodera glycines
QPTNFAFQKSELLRMKEQAEQSGDVARVRDLQQQVNELEEKAKKIEHQRTKNLSAISAINQRNRDHMKQTFLGAGMVREEQEKDDDPFTRKSARMKVVSGSVKSKTAGEGSGANAELSVMDTMVSSLGSLSSSSESSPNKKVQLPSTHDLFNAHGIDI

SEQ ID NO: 169179 - protein, 134 aa, Heterodera glycines; identical to SEQ ID NO: 163384

SEQ ID NO: 169180 - protein, 138 aa, Heterodera glycines
GTDSTNNGHYTDNLNIAAPGVVTQHVCKASNLNQFQLSQINSLHPDTGVVGVYLSTEGTKVLPFVKAAAQGLREMASKPISDELLQACKLLAKGTALTPDEFIALLKTVTADDVKKAASPTLRQSPYLAGEVHQAGPT

SEQ ID NO: 169181 - protein, 107 aa, Heterodera glycines; identical to SEQ ID NO: 163383

SEQ ID NO: 169182 - protein, 141 aa, Heterodera glycines
MFPRPSTSFPKILNRTKLCQASVVGSNRTMSSSDKLQQQKVLTVDTINPNVITMEYAVRGPIVIRAVELEKQLAKESLPFPSVIRANIGDAHAMGQTPITFIRQVIAGITEPALIKQQPNLFPEDVQRKVASLLRACGGGS

SEQ ID NO: 169183 - protein, 108 aa, Heterodera glycines; identical to SEQ ID NO: 162268

SEQ ID NO: 169184 - protein, 218 aa, Heterodera glycines
VFQMMFFQLSSSAPTSSSVDGPQQFFQHHHHHHQFVPSISPLFDTSGAGMLGTLAAPTTASIFMPSLFGGCGGAAAGDGTITAAGSLMQSLLSAAVCSGAFPLVGTTVAASPLTATTSQHRKLFIGGLSHETTDEQLRDYYSKWGKVIDCIVIRDPVTRQSRGFGFVTYATIEMADSAMADRPHTIAGKVVDPKRAIPREQMLHATSCPPAFLDVEPP

SEQ ID NO: 169185 - protein, 366 aa, Heterodera glycines
  unsure (1)..(366): unsure at all Xaa locations
MAVPQEVIDKIEAGYKKLQAAADCKSLLKKYLTKDVVDACKDKRTKLGATFLDVIQSGVANLDSGVGVYAPDAEAYTLFKPLFDPIINDYHGGFGPSSKQPATDLGEGKTQLLTDLDPEGKFINSTRVRCGRSLQGYPFNPCLTKENYVEMESKVKAVFEQLKSDAELGGTYYPLQGMTKDVQNQLIXADHFLFKEGDRFLQEANACRYWPTGRXGIFHNAKKTFLVWVNEEDHLRIISMQNGGNVGQVLERLIKGVKAIESKVPFSRDDRLGWLTFCPTNLGTTVRASVHIRLPKISAKPDFKSICXDALKLQIXRGIHGEHSESAXGGVYDISQQGXRLGLTEFEAVKQMYDGVKHLIELEKKA

SEQ ID NO: 169186 - protein, 197 aa, Heterodera glycines
MANELISPTPPDIENIFKRLRANPSNKVCFDCGARNPTWSSVTYGVFICIDCSSVHRNLGVHLSFVRSTNLDTNWSWIQLRAMQIGGNANAVAFFKQHGCESNDAQVKYHSKAAAMYKGRIIDLATKAQQQAGSNIFFDALKEQQSPQSKGPNESEFFGSHETEEHTKEMKEASLSEIPHAPIQKTKKITLGQKKGG

SEQ ID NO: 169187 - protein, 188 aa, Heterodera glycines; identical to SEQ ID NO: 163822

SEQ ID NO: 169188 - protein, 227 aa, Heterodera glycines; identical to SEQ ID NO: 164132

SEQ ID NO: 169189 - protein, 102 aa, Heterodera glycines
  unsure (1)..(102): unsure at all Xaa locations
XYFESFTENGDRNAFGWNTKTLLFARTELLRLLLLLGANCDPPAFACCGLGFGENLEPATFDWNSFGAGCGDPDFTKMFASKLANVSYFESFSFSYSNRSIG

SEQ ID NO: 169190 - protein, 70 aa, Heterodera glycines
AYGWYYVRIAPVEQKVWKGFFFDAFVKPVKEQLPHWWMFFFPVVTYFLVTDWAKKEYRRLGRIKEFTDEE

SEQ ID NO: 169191 - protein, 159 aa, Heterodera glycines
AFFHAEVEKRRQCVRERPTPRKTASSWVQTQSLLKRSLIDNWRNPGLTRAKLFQKLIMGVFIGLLYMNTQLNGVGVGNLNGAMFYIIAELTYSTLFGVLTFFPADFPLLAREYHDGLYCSGAYFVARSASYLPLFTIDGILMVTIAYWLIGLVPTVGRF

SEQ ID NO: 169192 - protein, 191 aa, Heterodera glycines
  unsure (1)..(191): unsure at all Xaa locations
MVSTSPSPPIAMAQHAPLSHRQHRAPLAKVLASEKSLYLSMNAIKTPKKAKMQKVAPIRAQIGDHSEWIPLRASKHSRQTVNPIRRFTDSLSVEPNPNKTPIQLNLGDPTLTGCLPPSESVVAALREAIDSHRFDGYGPAIGTQSAREAIAEHFSCSEAPISANDVVLASGCSHALEMALXAIADPGHNIL

SEQ ID NO: 169193 - protein, 114 aa, Heterodera glycines
LIMSLLFSLFSSLVSDLLKGLMKLLLFFEQWAGQCQYGAEKTVTFVGVSLRSFVCPSNNRWVSILERRELKTRRNNLLIFSIVLLLWTFQSFCYDSFQISKLSPKILKHKLFSN

SEQ ID NO: 169194 - protein, 177 aa, Heterodera glycines; identical to SEQ ID NO: 163692

SEQ ID NO: 169195 - protein, 70 aa, Heterodera glycines; identical to SEQ ID NO: 143743

SEQ ID NO: 169196 - protein, 94 aa, Heterodera glycines; identical to SEQ ID NO: 163378

SEQ ID NO: 169197 - protein, 141 aa, Heterodera glycines; identical to SEQ ID NO: 161711

SEQ ID NO: 169198 - protein, 180 aa, Heterodera glycines
MNKWRLDLCGSAGSRTLMLRSAAADQSLNPPGYNPGLSTTQQNESANRAEQQQQHLLSKRAWDLALQPVKSLPMNMLPFRFMMYMAGNTISIFPIMMVVMMAWRPMKTLMSVNAAFKPLEQEHVGSLWIHKIVFALGNLCAIALAVYKCHTMGLLPNHASDWLDFVPPLERAQYALFNDI

SEQ ID NO: 169199 - protein, 101 aa, Heterodera glycines
KKKRKKERKKLQTYESVEAKFDLQKIEKMSTLTNRLNKLADHLGEIGHLHFEKGDLNAMDLEEKPMFEIVRLAEQKQHEIEEGRRNGKSKAEKVTEAMANE

SEQ ID NO: 169200 - protein, 299 aa, Heterodera glycines
MNRRWICGDVWMDILPSFDRPELGLKMALLSDRFDVLVDTHFDGKNELTIWRTINISKDKGPKAKLSVEIGAKFVAFPLPNHSLPNKICFKDLRIDYIDHSVFAFLRSNKPIWDRMGTKLEVFVHAIDTDVQPIWDVFVREIWPIFATNIRHLSFAGADALDNLRRRISPTLLTDLVQLYSITSYGLCPDGISDDGPNATAGQALSKWLHTPSKNGKANELYCCAYFCEITWINTFKETFLRATTSVAYNVRLELLVANEMNTVEQFELVNEMTQEKLTLTKDEEICLLKRCPIVGETA

SEQ ID NO: 169201 - protein, 210 aa, Heterodera glycines
  unsure (1)..(210): unsure at all Xaa locations
MTSEKEMLWDKACLLTRLVASSVRLSEAAGGIIKDIMKSGDLKIVNKDQTGQMKDLQTEADRSAQICIERSLHIAPPSTPFQTLQPLPSSHHFHIIFNENATTAVPSSEVLSNDERVPNELRSIEMKDVVVXVDPLDGTSEFTKSKENPALLRQVTVLIGITHKGRPVAGIVHQPYYEGQQTADGLAPNGRTIWSIVGVGTFGHQKTAQQ

SEQ ID NO: 169202 - protein, 74 aa, Heterodera glycines
MSNPIKIVRIVEIIEADEAAGQPKQVVAEYVDGTGRRVTMKASGEVRIGQLVAFFEGPDRNRIQRCFTNNNNNN

SEQ ID NO: 169203 - protein, 152 aa, Heterodera glycines
FEHALFLFVFPNIKHTFEIRLSVTDLFAITSLHLTIVFLSLSSLVLLLELELGSKERNAESARQIKKSADEPTPTFDLHERRKVVRPSVTDWAGRCCRLPIGDFHGFGVVNAGSAGQMHRAHRTRRNGDNKTFEKHLSRKCHKNSAKKDGEF

SEQ ID NO: 169204 - protein, 141 aa, Heterodera glycines
NIQKENDFVLISLFLGIERPVFCLDWHGTFTAFHLLPNRLQKLPESPPAPRAADSHCLRCRGAMPTALAEPMPGAASGTTPWALSRGAQEAEGKMIRAMAAATSSRKANIEGNEGRHILLIGRRDILLWIFNDKIRTKIIS

SEQ ID NO: 169205 - protein, 158 aa, Heterodera glycines
LVHSVPKFPASTGADYLYPQSGKRNGQSMLCITLSSTALKEIGQQLFVAQPNVYDFQLPDSFARLFPDLAKAVNRTTFPYKKRVPFSVTDVHSLKGQSFTTFHKHKQFGKDLYSELVAPRLKSSIYVETWLVGRGDLPSDCSSSFKVHNVLSVKASKF

SEQ ID NO: 169206 - protein, 156 aa, Heterodera glycines
EKNFCDAKGLMRFSPRIFPSFLQQLINRNFLALHCPLPATSAAKFSTDGKSDVFCASLLHNELCEKLDKRKEEWRKQRPGTKEYTATKEQLNQLQEEIIKIENSKYEFLHTERDKMSIANLVLAPTQVTLEVISNGTTHLRPSVVLRTPLNAYLFN

SEQ ID NO: 169207 - protein, 112 aa, Heterodera glycines; identical to SEQ ID NO: 163372

SEQ ID NO: 169208 - protein, 158 aa, Heterodera glycines
RNLSLLLPYFSSSSVQFEMSKHFLFLALLFFVGQISAKSIHSKSEEKEDPFFGEETDGTEEPQETDEPKPYGWENIYEKCMDQFDDHKKCCEVSGGGDECLLEDTTTEAGETTTEEPEYSDETFKKCMAKLNQSKDNCCFIFEDKKLKECEHWQPQTT

SEQ ID NO: 169209 - protein, 195 aa, Heterodera glycines; identical to SEQ ID NO: 163371

SEQ ID NO: 169210 - protein, 89 aa, Heterodera glycines
MKETNYNLSISSKILEALRHVFLDRPSAAHPSEFALCLSRQGAQIRIILNTVQHINATVVVEFKDECWSRSLLFLINTTDQLLSIGGSG

SEQ ID NO: 169211 - protein, 227 aa, Heterodera glycines
PRAEFGTRNFVSEEELQKQREAGEEKPESSEPVDKRTLYERLKEQKDIKQLEYDETHALKNQFRGIDEAESDFLTQVERAKEEQEARKRKEEQELVRLSRQLTQQHATGATAEQQQHALLEKPQKASTAASSGISRQAALITSLVRRKRPLSTDSEPKSARGEVPSPPSSSDSDKRKTNEPSKASGGPPPKQRHESHCQIIGVLPGLPNYSDSSDEAESSNNSESLE

SEQ ID NO: 169212 - protein, 82 aa, Heterodera glycines; identical to SEQ ID NO: 163370

SEQ ID NO: 169213 - protein, 306 aa, Heterodera glycines
MLTHRKYRLLQFASVSGRALTISPEFRQLSSVSSIPSNSHKTSKSDGKAPKSSTLWLNLPSNAEEDVRTRVRSSFFGTYVALLFPAATFALGCWQWKRHKWKTELIEKLKIATKTAPVEFPVDNLSAIDDMEFRKVHVRGYYLFDRQFVIRWRCRLDPANTGTSNSEKYGAYVITPMRLEGTNVTIMVNRGWVPNENIESELKKGKQLRESELKDLNAVVRSAEKGSPFVKNDPEKGIWAFKDLEEMARQSDAVPIIVDADFESTEKDGPIGGQTIVVLRNQHYSYMVQWFGLTVGVLGMWALRFL

SEQ ID NO: 169214 - protein, 190 aa, Heterodera glycines
MANFPPNSDEEFDRGNFSSLSGMVGMNQRHLDWLMKNISREDMAELQQRTGQCARKCAVTYGGPIVVVTIGFLEFLRRKQNLPITAPRFLIGYPIMCLTSVALGSSIGFKRSGCGAEMRLFLDKLYAKYDSQMNAASAQMAPGVGGGTSPTKTYAQLREANRAGRPIELGQLKQQQTRQQQKKMDGSKAT

SEQ ID NO: 169215 - protein, 155 aa, Heterodera glycines
MSPKQFKLTHSLFSFQRISQADGVKRKQMKADESICPPQRKKPSTSLKEADGSDGAVENVQTKENMRPILEAERHQQNDDGTGEIRSPPSSSPTPWHPSHALAEPTWQKLLRKEFQMKYMTNICCFLEEQAKQGVSVFPPRHLIFNAFNLTPFNN

SEQ ID NO: 169216 - protein, 202 aa, Heterodera glycines
GLQVSKTRGIILPQLVISAERGERECHIVVLLDEDVVDWDEEYPPQMGEDVTQVVYSTPLYKFFKYAENRDVAKRVMKDRELKKIRLGIEGYPTHKEKIKRRFNRSEVVYNYVQRPFLHCSWEKEEARSRHVDFACPIVKSKSNPSLASAASDPLPQPAPLQNNINNGWAAENGAGEHSANFQQRPTNDNDGSSGNENEAVH

SEQ ID NO: 169217 - protein, 106 aa, Heterodera glycines
GTQLALFDRSNISFAVSFLAGGLAIGYLLGWRTAASKLARCNTRVQLSKDKVVDTVELEDIGEKKAYCRCWQSKKFPLCDGSHNEHNKKTGDNVGPLIVPKAKSAS

SEQ ID NO: 169218 - protein, 146 aa, Heterodera glycines
MEEQGPFLIDWRTLFGKAPFELRKQCIRGHLRNSHLRSIVWRLLLGVLPMEDRTQWVEVIGQERRNYTELRHRIESNPRINNSPEGKNFDGNNPLSLNAESPWCRHFENQSTRKNIEKDVDRTCLKSSKQCLRQLHITVQSAEEAK

SEQ ID NO: 169219 - protein, 137 aa, Heterodera glycines
MSSENPPSPMQRQQSSVQLQQSSVSDMGDPDDCFSMFLVFMSYVLLFFTFPCTIFSCIKIVQQYERAVIFRLGRIRRKAQGPGLFFILPCVDEYRCVDLRTVTCDVPPQQVLSKDSVTVTVDAVGFLSWTNNRRFCI

SEQ ID NO: 169220 - protein, 98 aa, Heterodera glycines; identical to SEQ ID NO: 163711

SEQ ID NO: 169221 - protein, 297 aa, Heterodera glycines; identical to SEQ ID NO: 162552

SEQ ID NO: 169222 - protein, 111 aa, Heterodera glycines
SVRGAPRFCPAKHRSHPSSKCSVARLSSAEVPRPLRKNSPSATEGSQRRNVRLFVAFFCCCCCPMQRELMADNGSGGFGCRSHWPTLAKRSAERRGGKGSSGRRRTFATSV

SEQ ID NO: 169223 - protein, 86 aa, Heterodera glycines; identical to SEQ ID NO: 166346

SEQ ID NO: 169224 - protein, 42 aa, Heterodera glycines; identical to SEQ ID NO: 166345

SEQ ID NO: 169225 - protein, 280 aa, Heterodera glycines
MSPIDPDKMALLKRLFPVLGKHLRKGDCGKIGVIGGSPDYTGAPYFASITPMKIGADLAFVYAHSDAAPVIKSYSPELIVYPSTDFATNRHSIERLDALVFGPGLGRQKHTQNLLADVVNFVRSKQNLCLVIDADGLFFVKECSQLFKGCTDKVIITPNHREFVRLYTQMFPNQQKGEDTDELKIQCEMAEQLAKHLEVTVMRKGEIDIISNGSSQTRIVQAETSMRRCGGQGDILSGATALFAFWARKASDADIYSSEHLLDGAEAASLLVRNASLRTF

SEQ ID NO: 169226 - protein, 165 aa, Heterodera glycines; identical to SEQ ID NO: 163308

SEQ ID NO: 169227 - protein, 67 aa, Heterodera glycines
MSMTWPKYLGSYITLQNAFRMTLAALIPAVAKMYEDSEVARLTRFRDRSAMFGRPPPPPGVEEIPSW

SEQ ID NO: 169228 - protein, 93 aa, Heterodera glycines
IFKKESVRTNKTITKSSIRLLLFIFAWIICFLFQFTCALRFPPCHTTQAHIEHRCLNRHSFGGFWRSARFDILILNAYHLKSVRKIRPKKQKR

SEQ ID NO: 169229 - protein, 112 aa, Heterodera glycines; identical to SEQ ID NO: 163356

SEQ ID NO: 169230 - protein, 581 aa, Heterodera glycines
  unsure (1)..(581): unsure at all Xaa locations
NQEPVTKRGFCQFVLDPIFKVFDAVMNIKKDEVAKLVEKLNIKLTLEEKEQEGKPLLKTMMRKWLPAGDTMLQMIVMHLPSPVTAQRYRMEMLYEGPHDDEAAVAMKNCDPNGPLMMYISKMVPTSDKGRFYAFGRVFAGRVATGMKARIQGPNYVVGKKEDLYEKTIQRTILMMGRYIEPIEDIPAGNIAGLVGVDQYLVKGGTITTYKDAHNMRVMKFSVSPVVRVAVEPKNAGDLPKLVEGLKRLAKSDPMVQCIFEESGEHIIAGAGELHLEICLKDLEEDHACIPLKKSDPVVSYRETVTEESEIVCLSKSPNKHNRLFCKARPLPDGLPEAIERGDVNPTDDPKNRAKILTEKFEMDATDSRKIWCFGPEGTGANLLIDVTKGVQYLNEIKDSVVAGFQWATKEGVLCDENMRGVRFDIHDVTLHADAIHRGGGQIIPTARRVFYASVLTXAKPRLLEPVYLVEIQCPEAAVGGIYGMPKPPPWGPPWRKNKMLGTPMFIVKAHLPVNESFGFTADLRSNTGGQAFPQCVFDHWQVLPGDPFDGTSRPGQVVTETXKRKGLKEGIPSLDNFYDKL

SEQ ID NO: 169231 - protein, 99 aa, Heterodera glycines; identical to SEQ ID NO: 166341

SEQ ID NO: 169232 - protein, 50 aa, Heterodera glycines; identical to SEQ ID NO: 166340

SEQ ID NO: 169233 - protein, 206 aa, Heterodera glycines
MMSNAATPKLAKKVLRKKIGEIIAQQMAGENGGNIRERETATVAQKLLVNEWFRNSTRLSIYVSNEQEICTDDIVRTALREGKEVFIPRFKKGAERMEMLRLESEKEFDSLEGTLWGIRQHSASLSPPSFEETSAKAPLDLVVMPGVAFTTSGKRLGHGRGFYDRFLNEYAQKYGTVPRTIALALKVQLVDDLPMESKDRMVDEVI

SEQ ID NO: 169234 - protein, 155 aa, Heterodera glycines
AKYFFYDPDFAFLSLGTYSALREIAFTQQLAQHRPDLHFYYMGFYLFDCPKMRYKNRFRPSELLCDHCFNWVPVTECDRILEANGGRFSTFHPSAEPTRAELDSAQMDQILCLHGDPPRPLTFASLCNSLETAAAHPSSSTDSQRQNGRGEGPEM

SEQ ID NO: 169235 - protein, 202 aa, Heterodera glycines
  unsure (1)..(202): unsure at all Xaa locations
MFRVAKTPAHYQQSVRSFATLKDISIRLKSIKNIQKITKSMKMVSAAKYAKAERELKGARTYGEGAQFFVSNITAGDQTEPVKVAESVVESAGRKRLLILMSSDRGLCGSVHTSVAKTAKNIMANKPADVDYKIVCIGDKAKMLMQRLYAQXFLFTVNDIGRSPPTFQDASIAANAILSSGYEFDGGEILFNRFKTVVSFET

SEQ ID NO: 169236 - protein, 61 aa, Heterodera glycines; identical to SEQ ID NO: 166337

SEQ ID NO: 169237 - protein, 140 aa, Heterodera glycines; identical to SEQ ID NO: 164430

SEQ ID NO: 169238 - protein, 195 aa, Heterodera glycines
MLPSMSKKQRKPEQNNRQLRIIEVQLFTPTARRYPHFDYEEMCKELGLEISKQKETAESNSFHDQDAEEIVRRLEAKYGSQTVVSLPSTWKKPRKKTKKAIKFAPEDVMDKGLGYDLEDDFIDDEQAYDEWVPTTMDTAKRGHYVNKGPLEFRQIDFDQTTSEEDEEKDGEEESNGTRRETSILEADEEEAMNME

SEQ ID NO: 169239 - protein, 220 aa, Heterodera glycines
GAFSASHFSYSTSVTAASSANSKTPTNCSTISDPKTQRPQSSPAGTMAEGWQNRLENLEFIDDDIISGEECPLIRPNSSGKVPTANVPSNFLSNTTMPHKLQTTSTRKDSNCSVTSLLPNAEKESDKSFAGVALSCGGGKKAHQLNDIKAVVEKLSRLAFELSATRHHSSTIHSTLSHVRLKPSAKFELLDIDLEKFQTLQNSRSSASPSSAGTPSDQLP

SEQ ID NO: 169240 - protein, 420 aa, Heterodera glycines
MSATTHSLSKQEIARFSRQLMLKGIGPSGQERIRETKVLIIGAGGLGCPVSMYLVAAGIGRLGIVDHDVVSIDNLHRQTMHDQKRVGQSKADSLKESLSRINNEANVVAYNVLLTSKNVLQLFRDYDIVADCSDNVATRYLINDACVLSGKPLVYGSALGWEGQFTVYNNGTNCPCFRCIFPDPPSPEHVMSCSEAGVLGPVVGVIGSLQALEIIKIAVSGKSSFAGNLWMFDGFEGISKRISLREKMSNCAICSENPRITELQDYQKFCRSDPSNKVRSLCLLSAEQPVSPTEYLNLRNKIGGSFILLDVRPPTEFEICHLPEAENFPWEELRRAKMEMIIDKINNSMERKSPTINGAGNNGKTKVLVVCHHGNDSQLAACHLHKQLSEAGIGDRFIVRDIVGGMDGWALEVDADFPRY

SEQ ID NO: 169241 - protein, 162 aa, Heterodera glycines
MLMTSRILRLWQPGAPRPRVFLPDFWIKLVEQPSKGYNRLPKNAAAFEVDLKMSRMDVREYLEKIYKYPVRDVRIRVTMGDITWDHPKDRDKRRALWKEEDRKIAIVFFKKGFIAEVPDLFPGRGTDAEIDQMKKFQEQDANTFNSRFVNRGRAGIGEMLPI

SEQ ID NO: 169242 - protein, 139 aa, Heterodera glycines
  unsure (1)..(139): unsure at all Xaa locations
PEYIFIFRDGLSEGQFAMACKEELRALKQGCVEYDSRYQPKFVMIVGTKRHFKKFFLEEEGRKGRPFNQNLTPGSIIQDKVXRADITEFFLQPHAPIHGTGKPVEYTMLEDEIGISMDELQGVIMALSYSHQIVNVEVS

SEQ ID NO: 169243 - protein, 82 aa, Heterodera glycines; identical to SEQ ID NO: 166328

SEQ ID NO: 169244 - protein, 59 aa, Heterodera glycines; identical to SEQ ID NO: 163346

SEQ ID NO: 169245 - protein, 132 aa, Heterodera glycines
  unsure (1)..(132): unsure at all Xaa locations
RLEKCWFCSSTIYPGHGIQFVRNDATVFKFCRSKCNKLFXKRRRXPRKLKWNKGIAGEFGEKELVNDVYSGHGKFAKNQPPKFVGTLWENGVXAIREISAFFHRRCRKTIKNPLEPGKQTVEKGMVEKTPQK

SEQ ID NO: 169246 - protein, 106 aa, Heterodera glycines; identical to SEQ ID NO: 166324

SEQ ID NO: 169247 - protein, 162 aa, Heterodera glycines
ELRLKDQAYLVGALDKVEKLAVRANDKTKKLEHDTLLKVKELLETKFVRQHEWNEKEIEVLNKHLFLTAKPIVYLVNLSEQDFIKKKNKWLPKIKAWIDENDPGAVLIPFSGAFELKSVELDPEARAQFFKDTGACSALDKIIKTGYKTLCLEYFFTAGKDE

SEQ ID NO: 169248 - protein, 68 aa, Heterodera glycines; identical to SEQ ID NO: 163313

SEQ ID NO: 169249 - protein, 75 aa, Heterodera glycines; identical to SEQ ID NO: 163775

SEQ ID NO: 169250 - protein, 125 aa, Heterodera glycines; identical to SEQ ID NO: 163343

SEQ ID NO: 169251 - protein, 274 aa, Heterodera glycines
LIMPCQLPNEIATVTDDVFSYMCNLAMEKCSKKADKKKASCGGAAMRKRLLIKNFVAQMLAQDRHSRELSSPTSDCSSHLNQTFDESFDFPSCQSGANAVDQFGDDMEMDAIGEEVPSNATNDAFLCLDQPSSLLTDLDDVSCDPQQQCHSSCNRKRPWSLVFSADATATADSMPMPSLCSMGVVVDQYNHHHLSNTNNSVVDMFTAATSAQHHHFINSTANNINNNGVLHSSAPPLLSPLCCGMLQMSPFGSATAAGEAMLFNGAGGGAGGVG

SEQ ID NO: 169252 - protein, 108 aa, Heterodera glycines; identical to SEQ ID NO: 166318

SEQ ID NO: 169253 - protein, 185 aa, Heterodera glycines
ERATKTGLAAEAQQKIHSKFDLELSKQIFGWISQVTGESFTVSGEVEEYLTTLKDGTGLCQLENDLSPNSIKKINTSNFPFKQMENISFFLGFAEKYVNKSELFQTVDLFEGQDPNSVLICLAALARKSEKSFGKAGLGPKEAEGSKKEWTSEQLRAGDAIIGLQMGSNKGANQSGMIMGNTRHM

SEQ ID NO: 169254 - protein, 151 aa, Heterodera glycines
MAGKIFVVTGANKGIGYGIARGLAQQVNGATIYMTARTPSLGEKALDDLEKELGIKRISKLAFHQLDITDEKSCADFAAFLKKTHGGLDVLINNAGFAYKHNATESAAIQADVTIGVNYYGTKLISDQLGPLIRDGGRIVNVCSQMGVMGS

SEQ ID NO: 169255 - protein, 177 aa, Heterodera glycines
MVVLPIFAAVAGAVGEDKKRQRTGEAEEQLDGDGVITSAEQPTTTANSECSSIVGEATDGGGKTPTGGETVTNEYQQQCHRNNIINSGGSCPLALSSSERMVSELIAAVIEQSRQRQQLQKHQQQLLISTNKVEETNNSGGSENEAEGEERGDEMAPEEAQAAGTFCPRCSTRSKAV

SEQ ID NO: 169256 - protein, 26 aa, Heterodera glycines
EVEVNLVITDYCMPGMTGYDLLKKIK

SEQ ID NO: 169257 - protein, 228 aa, Heterodera glycines
MVVPPAPQIPKKIAEEHKKNGTQPQKEESKKDIGKKKQPQMAERRESSGESGKRGRGSGMSRESSKRAQGNSRKRGRERSRESSGDKGRKTMRRSSRSRSVKRRRRDSSSSSYSSTSRSRSRSRSYRRSPKRSPARDRRRDRTRRSTSNSSRSSSSSSASSSSQYSSSERSHSQSRSFTSDRDEEEERIRDRIIARTLSTSVTAAPAKQPQSKDDGVAMDEAMEYGPK

SEQ ID NO: 169258 - protein, 136 aa, Heterodera glycines; identical to SEQ ID NO: 166312

SEQ ID NO: 169259 - protein, 64 aa, Heterodera glycines
MKVKLYDHDKGPDADDLMGTTTTDEQGRFQVSGKTTELTTIDVQLRIYHDCDDGMMPCQRKVTF

SEQ ID NO: 169260 - protein, 407 aa, Heterodera glycines
VQNEFGRRPLLGYLASLSDELVQQLFESRPCVVAIFRLLPAFAQQSVLQLMFHKSSDWRSWTRSRFHLAMSSAVQLLFRLRILEGNSNGDFQINLDFRMNYVSSLLANPLELSNLKMHHLDEEKARKATKDLMGKSVERWESILCYLALPSEAAEKSVSETTKDLFQFIGLVRGRAKEPEISSIGFQFLLLGRSEQIWAYLIHYMRFIASKGEEVFPVLDFLLRLTLCINGDDALAQPLRLDPNWPEIVQAFVVTLRELGLIFIRKRKDGWFLLTPLMTQLSVAASAEPLEENAGQNGVALRNSPLTNSHATNGTKGGRNGDGFLIVETNYRVYAYTNSTLQLAILSTFTELLYRFQDIAIGVLSRDAVRRAFQTGITARQITQYLSTNIRQPPSARNNSQLSDSSV

SEQ ID NO: 169261 - protein, 91 aa, Heterodera glycines; identical to SEQ ID NO: 162611

SEQ ID NO: 169262 - protein, 88 aa, Heterodera glycines
PFCLGRCGGRWACECAWGKRCWGPWPTAAARPLSIFPPPPPPPRFVLFALCGKIVAFFGSTVPFCLIVRATSTYYCCCFFRIKIKFVP

SEQ ID NO: 169263 - protein, 103 aa, Heterodera glycines
SIHSINFQYLSPILHANLSKLDIFSKNSCAFSAVFSIAYDEFVPFVSSPSIGNEMISLKLFLHSSSGHFSTKVIRQKAIERAKRSEREGGILRKYLADISAKF

SEQ ID NO: 169264 - protein, 79 aa, Heterodera glycines; identical to SEQ ID NO: 163331

SEQ ID NO: 169265 - protein, 49 aa, Heterodera glycines; identical to SEQ ID NO: 162384

SEQ ID NO: 169266 - protein, 210 aa, Heterodera glycines
HLRNTPQSPAATAPPTSSQSQHFQQRPHVAYHQPPQQHYPLQQETNQSQHIRPQPGVRPAHPQQHPTEQQYPSMAGPLFQSQPSSVQALQEHEIGNVGQPRLAQHGHTHISHQQQVMMGQRHATHHPSQQQTLISQQQSQHPQQQHPTTAIRIEQSGQVVHMHAAPPAPPQHQTQRIFVQQQQQQQMVPTLPPQSAHDPSLHPPPLPHPH

SEQ ID NO: 169267 - protein, 212 aa, Heterodera glycines; identical to SEQ ID NO: 162360

SEQ ID NO: 169268 - protein, 123 aa, Heterodera glycines
MTEATKIYNRLSAFQKFRINLNCHLRRVRSNWLYQLSTALVFVTALNHASIYLTYGPDHPRCMQQWKERKQRGLLTDELLWKERLLYARRREFLTAVDGYGTVDNWKHPRATMGASTLSSKLF

SEQ ID NO: 169269 - protein, 92 aa, Heterodera glycines; identical to SEQ ID NO: 162578

SEQ ID NO: 169270 - protein, 152 aa, Heterodera glycines
MLIACIPKRIHLNLNVVGAALRQRMPFSAAVLDPHDQLKDSDKPMSEQMNPSFFKMVDYYFDKGAAVIEPKLVENFKASHGKSKEERVSSVKGILAAIKPVNKVLYVTFPLRRDDGSYEMIEAWRAMHSEHRTPTKGGIRFSMDVNEDEVKA

SEQ ID NO: 169271 - protein, 53 aa, Heterodera glycines
VSVVPSPPFADSMFQSGTFTRGTDLAFFAATTGEAHKKAIISIRRRKKRILIG

SEQ ID NO: 169272 - protein, 51 aa, Heterodera glycines; identical to SEQ ID NO: 162218

SEQ ID NO: 169273 - protein, 363 aa, Heterodera glycines
  unsure (1)..(363): unsure at all Xaa locations
AATTAWISIGSPNDLNEEHFPDEYEPPDVPNYGAKVKVCYARVXLADKEISRARRLRLTPSAQDTRLFPDYEVPGVIHDLGPEAPPGEYDSQVAHLVIEWASDXMCQHGYADYGAVPHLPLLAEIPDTLAMHVATSLPASASWALSASVHAQPVVEDITSTXGCCSIFTAAAGGLGLWILTLAXAFLTAGLDNTIKLIVAASIDERLCLTEHHVPDFLVHCDDSESFEYIFLRTLARLTNGLHIVFDFVTSPRTGARSLKCLSEGGVLFIGGISGLDVQLPIQLVAKNRLAIMGVTRGSIEQLKNLVTLLSEGQLNAPNYRVYPVDQASQVLKQLSMSEVEGRAILEVFNPDTEVKKAEEEQK

SEQ ID NO: 169274 - protein, 35 aa, Heterodera glycines; identical to SEQ ID NO: 166298

SEQ ID NO: 169275 - protein, 140 aa, Heterodera glycines; identical to SEQ ID NO: 166297

SEQ ID NO: 169276 - protein, 168 aa, Heterodera glycines
SCRIRHEGPIKGLFIFPAYLMARKNLCRKTFATFKQEERYPIVQRAIGARWGRKTIQTPNIEEEALQSVELRPSTSAEDFVESPPLTPSIATTSEVDVLSAETVEFGGSFSATAAQMDIFESTPSTFVVQMDIEETTPSPFTVNDRSQRIEQLENQLNDRDDKNLWED

SEQ ID NO: 169277 - protein, 142 aa, Heterodera glycines
MASAKCAREDCGKTVYPLEELKCLDKVWHKTCFKCTDCGMILSMKSYKGYDKKPYCQAHYPKTVPSAVAATPEMEQAKRNTAYQSQVKYHEAYEKQMKGTKMEVADDPETMRHKANMVNQSLAHYHGELQKKEKQDSQRDTT

SEQ ID NO: 169278 - protein, 116 aa, Heterodera glycines
FELKMNVYFFGIHPEFFFFFFFFTHSIHSLFTTAQNALIPSAATGTDVERCFGFLPAFVHFLVVPTGHLFIPISRNKIGANEKADNYQQKKHNETQMEHLEKAENYLKLLKAENYL

SEQ ID NO: 169279 - protein, 62 aa, Heterodera glycines
SQRNLLQPKIIYDKKKCRDRKEETIKGIRKSIFMEKQKRLSTTKIANGPKITPNRAKNAQYE

SEQ ID NO: 169280 - protein, 100 aa, Heterodera glycines; identical to SEQ ID NO: 163324

SEQ ID NO: 169281 - protein, 183 aa, Heterodera glycines
GAPRGGGRSSIVDPPGCRIPARGLDIILVTIGYKSFSLSEHISEFSECGISDFEPEFPIAPKVEIGTNHIFKGKTIVDDKSLPWMARILSGVSCTATIIGPRHVLTAAHCVEGQALENFVVSYGSADASNQQHKSGVEAIKYHPKTQHYEIKDKFRKNTRAYLFLNDIVVIKIKNSIKFSQNA

SEQ ID NO: 169282 - protein, 149 aa, Heterodera glycines
MDAVKAPTLASIHHKNRLQSPLNAHGHPLIIENGTVAETLVDKEEEELTEQVGTFLFTSESVGEGHPDKMCDQISDAILDAHLALDPAAKVACEVVTKTGMVLVCGEITSSATVDYQSVVRETIKKIGYDDSSKGFDYKTCNVLVALEK

SEQ ID NO: 169283 - protein, 109 aa, Heterodera glycines
MDEGTTENNNNRKSGAKKRKQKQKQQSVVAEVTEPHNKQSETEEAEKEKSKNGDSEKDGKKVNEASKPIPCQSISVIGDTVKSTILFITFILYSKILFYFSLIIKFCLA

SEQ ID NO: 169284 - protein, 190 aa, Heterodera glycines; identical to SEQ ID NO: 165760

SEQ ID NO: 169285 - protein, 209 aa, Heterodera glycines
FPPQSLSTLSLALLLSLVYYPSFEGRTNAYKQMLSIFQNAQEVSSLANLEASFKLDFTHLYNRLCATLHSERMPLLLLYLLLHNNVGFRNFVLSRINLEQLVLPVVRVLYDGMCSVPGHGFQRSSPTSSPKMRRQSQFSHNNSTVHTHQTYLALIVLLMLSEDDFFKKVIHEMTIKNIDWYTLDRTTHLAETTLGGLIVLVFSKTIQIN

SEQ ID NO: 169286 - protein, 211 aa, Heterodera glycines
DTMNFVKRIDFYYDVTTISSWIMFERLNVTRRLCPSIEYNFRPVHYSSLLTSAGSLVPFSTAALRKNFFEQQRELARVHGITIGTRHGVIDDLLAKLSNTVLPQCFMNMVASESGHESLIELSRSFWRKLWISNVHLDHEEFLESLRQLNIQIPPDEIIFDNRWGKLIEQWHCELLNQHQCFDVPWTVLHFDNDTTKNFNSFDKWPLIASL

SEQ ID NO: 169287 - protein, 219 aa, Heterodera glycines
VGCASFGAGNKYRDCDFPRLIYPSVGSVFTDSYCWYVNVTCEEANYGLPAYIEFNENPSTIVAAPEPTLGRRITVTLQCVGNSYGQRVWTKFGVDGDPSAVVQVKTVRCGTKCATNVSTTPATLTSPNSEGLPYCRDSCAARIGHGTRGQDCDQTLLNNALIVYPSYPYILYGCWYVSVTCEAKANGNPIYIKLNDEEKTIVTSTQPPFNKITVNLQCA

SEQ ID NO: 169288 - protein, 201 aa, Heterodera glycines; identical to SEQ ID NO: 162337

SEQ ID NO: 169289 - protein, 123 aa, Heterodera glycines; identical to SEQ ID NO: 163169

SEQ ID NO: 169290 - protein, 128 aa, Heterodera glycines
FFLLLLLFLLLFFLLLLLLLLLFFLLLLLLLLLFFLLLLLLLLLFFLLLLLFLLLFFLLLLLLLLLFFFLLLLLFLFLLFFFLLLLFFFPLLLLLLLLFFLVLLYLFFVFLFYFSAYILAVFLIGSVL

SEQ ID NO: 169291 - protein, 119 aa, Heterodera glycines
FRPNKVKPTIFTQFVEKPGKDLWFYCDNHNSTWLFHFAVKFIICICILVTLCLKLKTVPSQSQSLKTVQRKAVSLDLEQIFTSDLSIKPAETNPCTKAVAILPPPMTVKHFSRSLKHST

SEQ ID NO: 169292 - protein, 158 aa, Heterodera glycines
TGLQVHGNATVEGYISALRRGSRLLELDVFDGEHGEPQITHKRTFIGAISLRNVLKCVKNYAFVQNPYPVILTIENHVGFVQQRIMADIFQEILGDHLLIPSDDLHTKPLPSPQQLKHKVLLRGKTAGGATTADINGGGTHAETTAATMAPASVAANN

SEQ ID NO: 169293 - protein, 203 aa, Heterodera glycines
MDSPKCQTLNFARPFFPNNFVLLEVEKSVADAFSSSNMITDQFNHESLSLTIRGHCSDPLVVCTSSRTFGAKDVEVSNTLLLLDGTPNGAGANQQHIVSITNRFVELSEAFLPDQTFRLKALLEQNLLDFYNENAPAAEESKGIKLNELLDHVQISEQQLREELAKFAVVEPAEGIFHLLSDECQQKFLDELVELFDDADTIG

SEQ ID NO: 169294 - protein, 97 aa, Heterodera glycines
AAAGLSSSSGSSPTILQQQQHRQFSSAISQQKSLTPPPLSVGSSTFNPTLEQLLQATQNISYSLSPLNSNGGMNGSGGEQHDGTNFNSNGTNNSNGG

SEQ ID NO: 169295 - protein, 139 aa, Heterodera glycines
SFEHLFQMDNNNQTINCSAIFRLFSYFSSNSITLYFSFSCGPSTETVVVFSWTHSFTSSNFCLIVGSTDSISHARASDSSNACFAFSYPCCIDLSPSLNLSLIPSSKSSNIPPAFERSTAQRKKRQNAKMTKGRNIWRN

SEQ ID NO: 169296 - protein, 130 aa, Heterodera glycines; identical to SEQ ID NO: 163312

SEQ ID NO: 169297 - protein, 189 aa, Heterodera glycines
MRFVAVIGDGKAVDIFVKVAAVVSKLCRKRAVVRITPNEFSFVNVYNVREGMHVDFRIHKDNLFNSWSFDGLSLDNNAIFFELSTDDFVRSLHSRATQIKLKMTKKDGVPHLRVELSANSLVNEIPIVLVVLRQWPDFNPPNMGISQLAVALPNVKTLTKIVSGVKDIGGRHLIFRANNRGEFNIIGYA

SEQ ID NO: 169298 - protein, 114 aa, Heterodera glycines; identical to SEQ ID NO: 163830

SEQ ID NO: 169299 - protein, 203 aa, Heterodera glycines
MKRNGNSICSETKPPLLELTPKNALTFRGKLGHVGSVSLDIKNCEICSVYFKVKSNANHFYSVRPNTGVIGAYGRVKVVIQLHDDSLAKLDEIEENKHKFLIMAAIVSDASIGTEKFWKGKKEGMDGIYSSKMKTEVHKVCRWEGGKGVLSQQNSEENVPNGKNSVSVEKVPNQILELCSEKEAPNQFSNLEENVPNGKNSML

SEQ ID NO: 169300 - protein, 137 aa, Heterodera glycines; identical to SEQ ID NO: 162910

SEQ ID NO: 169301 - protein, 156 aa, Heterodera glycines
RKNNIYMCVYVSLLSSNFIAHLFQKFHVAIAQLAPAHASVPTGHVKLGPKADDDRDQQSEGKAEEAHSFRVLFTNSERNNCGNVGTALVTPRQHEEKAFPFGRLPAERVDGKGWSSAGPLLWWLIYLAPFRLGTVRIDGWWRLVAKKAEILCHWHC

SEQ ID NO: 169302 - protein, 110 aa, Heterodera glycines
SSSFLVFFFLRCSADVPLQFLLHRASPLHLFPKFIHFLLPEFHPIGHRSGRGEEVSEANRPPKRSADTVENEMGLGQKRNVGLVFHAKVKSGGFALSLSPFRRNFGVFST

SEQ ID NO: 169303 - protein, 141 aa, Heterodera glycines
WIPRAAGFRHEASASSPTTGSSAAGTSHLGAAVAPPKAAVASDSGALPTGTPTTTETPPSTTASSTTTKATANEKRIAEEGSGGGLAFVTMFMLLGISVSVWLLYAYFNPHTRSGQLLIKYRPSKWQIPSSHVRYSASVHM

SEQ ID NO: 169304 - protein, 85 aa, Heterodera glycines; identical to SEQ ID NO: 163306

SEQ ID NO: 169305 - protein, 177 aa, Heterodera glycines
MDQLEVFLTYPPTVEDKELIATYSLAGRLLRPLLPRDENHRRLVYFTEELNSTDYFFSDGQNGRFCVVSLRLMRADKRQRMREYFNENMAVFSETYDCSFGFHELEAMEWDVAVIKVYREHMARCWNDMMGQLLYVVNMYDRGLDPVDMVRTPSAGESSNNGSDQSDVSHNDPLPSV

SEQ ID NO: 169306 - protein, 207 aa, Heterodera glycines
MRHAAAPIRDYDHLFKLLIIGDSGVGKSSLLLRFSDNTFSTSYITTIGVDFKIRTITVMGKKIKLQIWDTAGQERFRTITSTYYRGTHGVIVVFDVTSIESFNNVKRWLHEIDTNCENVQKILVGNKVDEPSRRAIPEAEARRFAESMRINYFETSAKENLNVEQMFQCITEIVLESCVDREKNNPRQATDVLKLRQRPEKKRKCCG

SEQ ID NO: 169307 - protein, 144 aa, Heterodera glycines
MEDQPQLSQGFFQTFLDEKVPADFQPILQVLETRTIGSSSAMGGYPPQGQQMRARLSDSLYSYSGCVIPQTVTRRFQDDGLSTHNGIIQVTSWKRVDGGKLCFFQVLDYTLYSLDFPVIGNPQPHSGNPAEFRRVVQPQKDPDT

SEQ ID NO: 169308 - protein, 116 aa, Heterodera glycines
MSNGTIFIDRDGELFAYVLDYLRTGKLLLPENFRELARLREEVQFYQIDELMQQLIPFYNLKFPPKTPTGQNNGSVALTAAVAAAVAKTNALYETGGFITLGYRGTFAFGRDGQAD

SEQ ID NO: 169309 - protein, 169 aa, Heterodera glycines
MDGDGDESYCDSDLELERSSSANNVNQLPLVPTEFTSIPEAMQNFNAVFDSRYGAQHAPFFHGSLQDAIAEAFDSPAGGAEHRRPLAIYLHDDQSVAAHIFAQTVMSNVNVSNLLKCQFILWAWDVSLADNKKHLFDWLELANLTEVSNCIGMGAAFRISDAYCADQGS

SEQ ID NO: 169310 - protein, 131 aa, Heterodera glycines
MLRIFAVRLRGQLWRLGQCALRVFALRHATAHVCSRSDDVKAFRERRIKTTIDRKSCPMPQQLIRWILVVSFLVIVLCCSALVVFYALRVIRRSFRNPVQTDGDIVFYNARNVHNFPHPAAMKQPTVEDDG

SEQ ID NO: 169311 - protein, 289 aa, Heterodera glycines
IIDESPVAIGNGGTETQLSTPFRGVLDVRFEPGQTLTVKGIVGEKARQFSVNLHSRTADFSGSDVPLRVAARVDRAKIGLNSMVNKMWGKEQRKGHSLKPGKPIDLRIRAHDKEFQIIIDGKAFKRYAYQSPLQSITHLSIDGDLAIQHIHWGGKVYPVPYETGLPHGFPIGKCLKMSGTPSLRKGGRFEVNLLRKNGHIALHLNARFDEKAVVRNSLEANEWGNEEREGKMPFERGHCFDLAITNEANHFGIFVNGQHFANFVHRSKPEDIFGLLIQGDIELTGLEME

SEQ ID NO: 169312 - protein, 94 aa, Heterodera glycines
GEETQKEGTERVGRRRRRRVAGERAQSVQRWANHRSELVQWRKWGQWDEEKRKRSERRGGKGGATANDCLEKHSRLETAQRHKPIKELINELIN

SEQ ID NO: 169313 - protein, 105 aa, Heterodera glycines
MACSVRLDHHILLPSHFFPKFPHHGPPPPIPPPYGEPYIPRLARRAAGSLSTLSSCAVISAEKAHKTTKRKAMIKRRGDIINRRCSSNLLLVKVNHLRKFSDFTI

SEQ ID NO: 169314 - protein, 109 aa, Heterodera glycines
MLAPIPIIEPATVTVPPNEDVVGSYDENQQREEELLVNQFVINSEAIKRILDDPRYADKKVCVVSVAGAFRTGKSFILNFFLRYLRWRSAPSVDEMVNDWLKMDPKLEG

SEQ ID NO: 169315 - protein, 148 aa, Heterodera glycines
MASRTFSRFASNFRLFGSVMATNLSGRSHCFVAKKSLSTSPLVYATAAAASQPTTPKATVKGKKGRVVAVIGAVVDVQFDEGLPPILNALEVQNRASRLILEVAQHLGDNVVRTIAMDGTEGLIRGQEVVDTGDPIKIPVGPETLGRI

SEQ ID NO: 169316 - protein, 107 aa, Heterodera glycines
MCKKTKSEPCCKKLSSCFSEEMKGSQMFRQVVELRNDIATNGCIAGGVECCDLTAHTVQRRPQTTGQLFLEKLYFVKHVDNNSLADSPREREILAEYRNLLYSIILN

SEQ ID NO: 169317 - protein, 57 aa, Heterodera glycines; identical to SEQ ID NO: 163299

SEQ ID NO: 169318 - protein, 63 aa, Heterodera glycines; identical to SEQ ID NO: 166264

SEQ ID NO: 169319 - protein, 73 aa, Heterodera glycines; identical to SEQ ID NO: 163284

SEQ ID NO: 169320 - protein, 111 aa, Heterodera glycines
KMMREIMTNGPIQVQVDWYVDAYLYGQNSTQVNVYMHTIVNQTDKGDYQEGSLKLIGWGEESTDKGELVKYWFGVNSFGTDWGLNGLFKWRRGTDECRIESKGISFGTPDV

SEQ ID NO: 169321 - protein, 152 aa, Heterodera glycines
  unsure (1)..(152): unsure at all Xaa locations
MANDVWLDTLFWIDRTEAGGXHFKLRKWKLGELGIHRAPSGWDWGGTATVTVMDDHPLMNPLPLAKCPAPNGVIGFRAIYIWCVDLEVITFLQCLQRVLNLGIAVQFTIHSKDVRCWYFEAPSAISVNYVVVCHRVATPRSLSGRMNGRASG

SEQ ID NO: 169322 - protein, 173 aa, Heterodera glycines
MVFAGVNCSTNIRWVHRWAWTSRRLCSSTKIIYEQNGNPAEVLKLSNEKIDQNAIGANEVFVRWMASPINPSDINQIQGVYPIKPPLPAVAGNEGCARVEKIGSNVRELKVGDIVLPTNAGLGTWRTHGIYQSTQLFPIDSSLQLDSIATAMLQVNPSTAYRMLHDYAKLVPG

SEQ ID NO: 169323 - protein, 158 aa, Heterodera glycines
FLNHTLSSSSTILSAAAAGANETTERFRLALDDFVTVHPHLTCALIAVSVSLATHLALFVFARLFDFALAKFRPFVRRCRLLRGGGRSFRVHISDAPLLSSNGPFIHSQFTQHQQRASGKSQLLHKVPTIEADGGDDDGGIANAEKAKRTTTPVATSR

SEQ ID NO: 169324 - protein, 157 aa, Heterodera glycines
QCVTNAKYNARNGSSPQNQIIKELPKCMLSAGAAESHITKLSKCLNKNILLPWTFVEGDTVYTQLETFTHMFAIQDCLESSADVKKVDSLVGKTCAYQLYLQYGYGASEDAAKKWLEACLHRANVGKATDALKCYSSALTDPAVIQRAADYIAKMRG

SEQ ID NO: 169325 - protein, 80 aa, Heterodera glycines; identical to SEQ ID NO: 162500

SEQ ID NO: 169326 - protein, 165 aa, Heterodera glycines
GAPRGGGRSRTSGSPGLQEFGTRERSAIDRANRAEINKVKMRLCLALFIAASALSLGRWIEAGVVEDVKDYVDAFSEISAPAATIGEQLRKISARVSKLVQLGGPVGSLAALAMQKALEPESEEMVALKLLHSTMVKRFDVLDRRVEHLGNRLVQHMALVEYDHV

SEQ ID NO: 169327 - protein, 168 aa, Heterodera glycines
MEIDEQHQANSAGHVVASGECVQQREQQQEMPDLSAMTEEEHLEYVIRLSMTGNQPTQSAQDGQHNQQHTRSPSGAMSTPAPTPMEVEEGTAGGNNAKGPAGGGVQLGDLLQHPEMLHQLVGQVPVDSSEATTKDQPTEVKESDEKKTSTKKEAERKDDNKKGNSSEN

SEQ ID NO: 169328 - protein, 67 aa, Heterodera glycines; identical to SEQ ID NO: 163289

SEQ ID NO: 169329 - protein, 213 aa, Heterodera glycines
MECIGCLAFRTSFSVLLRPFSSANFGQGARDIGSRHNVSSRHSALLEKALAPFVPRTAKELAEYLAKNVLYHSVGDVLVVHKPYGVGSLGYVQKEFGIFPTTQYKFKDRMDLFNGVKKDDSVTLEDAIPHLKEIFHEPKLHFCTGLKRWVSGPVVLPCSEKAFKNIGHSLFQGESISHSNEHWTAQHMHRALAICISRPPRDEGAVDGYATFQ

SEQ ID NO: 169330 - protein, 163 aa, Heterodera glycines
GKNKKTSSYKERKAISYQQGSDPPFLAQFKNKLGYKEWTVEDKFAKSDDEEEEEGADNPTDDIRKMREEERPQVVVLDPRTDLSAEELQKEIEKGNEEEDKRKIMEGKIMFRKPEKRKTENGCGKEGSKEEEEKEKRAKREEKPGQQQKEQNRRLLSFGEEDE

SEQ ID NO: 169331 - protein, 188 aa, Heterodera glycines
YFESAQSVCLECDKSCATCHGPGPLQCDECAQGFANHTMGYCRQCCSPDQLTQKDLHCEDCSKSYPEFRTKSHLSMLSLLANFFTIIGLVLLGTVLFYLCRQLICCCFGIGRNGNLSDLEYTPLTTIGDDLDGRKKDQKQNMGFALEDDESESDSDNAESLMEGEKSSPEAEKEQKQQRKVPTEEAES

SEQ ID NO: 169332 - protein, 216 aa, Heterodera glycines; identical to SEQ ID NO: 162622

SEQ ID NO: 169333 - protein, 158 aa, Heterodera glycines
CFFMYPPKDSDSNFFPNRMLSVDRSRSSSSHLVGLNAALQGCRSDIPFMLQRVSFSKDIKLHRMLRYLRACFVRDIREHNRGFNNGTQQTTKCQPEMIDQTNGVLNKRSWLEQNAYFAENNCFYPFYGQAVFYASFGQHSEGRVVCCSDGRIDEEESF

SEQ ID NO: 169334 - protein, 108 aa, Heterodera glycines
DFQEWDHQQNFLPHSHGQQGENGHHAALHCPGYLPLIGSDDQSWGWNLVNNTIAHNGEFVERYPRLNKRRNDGSKQRKTERTKKVIKTPTSMSLTDRGLMVYFHYTYK

SEQ ID NO: 169335 - protein, 143 aa, Heterodera glycines; identical to SEQ ID NO: 163664

SEQ ID NO: 169336 - protein, 200 aa, Heterodera glycines; identical to SEQ ID NO: 162443
  unsure (1)..(200): unsure at all Xaa locations

SEQ ID NO: 169337 - protein, 150 aa, Heterodera glycines
MEPSNENVNGDNVPNAALTGGHPPAEKIGCMRIARKERNLSQQPEEREKSGGTTPASASESGDSAHSEGETRVRPGATNVLAYTDLAKQTKLVYPTDAVRHCHEKPFPSKQAYTAHRTNAAQMQAHQQFQPRRFGHLKFQTREYGPLHKQ

SEQ ID NO: 169338 - protein, 156 aa, Heterodera glycines; identical to SEQ ID NO: 163281

SEQ ID NO: 169339 - protein, 158 aa, Heterodera glycines
IRTVKQKTRFAFPFFSSSIPMASAPSSDRFSSDHFFSDRSLRPQCLPNCASLSFGFVVDKLAQHCHCFSHLFECGQRIFEVSATELSPTNGFTSRVFRCEFEFGTFVGEKRMPTPKKRTMSAIAKVISLERMDTLWENFVGKKQMEKMRNSREQTEMI

SEQ ID NO: 169340 - protein, 60 aa, Heterodera glycines
RIFVQEIKVQVKCEKKSRSRSRQNRKKPGFSWTKFLNLFFQVTDVCQVFKNNLYKFKNTL

SEQ ID NO: 169341 - protein, 78 aa, Heterodera glycines; identical to SEQ ID NO: 166251

SEQ ID NO: 169342 - protein, 193 aa, Heterodera glycines
  unsure (1)..(193): unsure at all Xaa locations
GLLSLADRIDVLNSLTTEDRKLMVRLHSLEILGVSKVFDGIRTAYLALKHRKNRNHRQRIVVFLGSPLDPLLEEKETFIKFAKKLKKEKVSVDLVLFGEATAXNNNIIADFVDLLNGAEEGNSHLLVVMGGDTKLDDVLLRSPIFAGSGAALGAGGEFGINEEDDPELAMALRISLEEQRLRQQQQQGGEGTD

SEQ ID NO: 169343 - protein, 194 aa, Heterodera glycines
MDPSAVSSSSSTDQQQNAEEAQKGDLTLAQQIAEDKQKMFERSQQYQQEIEDEIRKTQPLVSSKQNIVHLVGEFDEKTSSQYFKKATELAGVYSDIRRIRGDGNCFYRAVLTAQLERCFEDAEELKRFNELVKGWRARLMAVGCFPELTTGDFCDSMEQLMTSLLNGTMLPQILLDDLNKDGIADYYVVFIRLM

SEQ ID NO: 169344 - protein, 198 aa, Heterodera glycines
MISFRHSVNKCLLPQITNRLTSNLSAMCLSTAAADNKVVSKYDDYQKEMRLKQIERAFDEAMPKLLHGSYNNLMAFLDTNSFRFEDKVWLFESDSIHKTVFRMAKVRLYLAFKSPHNRFETLGTHICLDENLVTLIWQLSWPKDAKSAYLLSPKSLAANFSATFTGGPRSQIGRIEHKLATSESSDRPPSNATTQNGR

SEQ ID NO: 169345 - protein, 66 aa, Heterodera glycines
LGLSPLTSRFLGREVKMHAFLHTAWEQGHFFECFSCKIFGLLQFCVHFSFFNRFQVSLAYFNYGLL

SEQ ID NO: 169346 - protein, 136 aa, Heterodera glycines
MCGCPTSANVVHSSPEPPTEKSAELANSSISRSVGNISTSPAKGLACSLSVNQTFKLVGIGCCLTCITNFPSAFMHTSVNTAVMELNSYLNESYTNRGTQLTDQHFSLLRSAINSCWYAGQIVGALCSPRLCDKYG

SEQ ID NO: 169347 - protein, 249 aa, Heterodera glycines
  unsure (1)..(249): unsure at all Xaa locations
MNSSEETTENVGIGGNKDERQTTSKDETDESSSENQRNEQRQRQMDSEKEDSRFECNICXDMAKDAVVSMCGHLFCWPCLFQWMDTRPYRQLCPVCKSAISKDKVIPLYGRGGGDSDPREKIPPRPQGQRTEETNQGFPGMFHWGGDNGGHGGGGVQFSTPISLWPTNFVRHGSAMSILCLGKVADVYLIDEPSAYLDFEQRLHAAKGIKRKKSGFIVEHDFIMSTYLADRVIVFDGPQPLVNGMNRFL

SEQ ID NO: 169348 - protein, 187 aa, Heterodera glycines
MVAAPDEAQFHISFYTDEEECKNLLPAESINVPASSHSDQLNVLINQIGSMNDDSWKPVQFDFLLHSVLLRCSLLELVEQQQLSLENVLRIECIRQSPAPRPTAELNEAQWVADLRTLSHNCVLSVNFAGLLNVWELAGEWTRAVVKQLDDEPLKCVDTFTRDDGTTFALSGGQNQTLTLVRLRAQN

SEQ ID NO: 169349 - protein, 152 aa, Heterodera glycines
MSSIEFSLPVFCSPTQLNFVIGKRDLCESKPIQIFNPYNHLLRFKFFSNAPERWRVENAQGGIRANNYVTTTVQLREPHTIRQPTSDCLRVEIFRDGESVAVGRKDILLNILTVEPPSSSVDGANFVEFSDGTDAALNSTAQRGEAKLRTNS

SEQ ID NO: 169350 - protein, 144 aa, Heterodera glycines
SSPRWRPLFNSGSPGLQVPGTRICSNFNMNFPSRTRTQLVTDCIDYSNEIEGIIRAVPLIWQRFEEASKFFRVINKFVGYFPPLRDSFPTPGNETLDEILRCAGVGVRLLVEAESVSDYSLSNLRGALFAIYYSAVYYMPTTDD

SEQ ID NO: 169351 - protein, 160 aa, Heterodera glycines
MGNCKPADATESENASSVETVEVEVPPDPLVNPFWKMQKAFEKKLRNLLKREKKLLQLKEERDSDKPITTDQHEALSKLDEVKTLIGFVDEMMKLNQQQFSQYKKAIKNRERQLKMEKARSQIGTPQLSDELKKSTEVQTNGVAEEVQAAVGVVGPSSEV

SEQ ID NO: 169352 - protein, 60 aa, Heterodera glycines
QAEAEAERAMDNNQMTAEYQARWFKKVQDSHTGSVIHVVRDEEYWRCKINRDWSRCPEIF

SEQ ID NO: 169353 - protein, 93 aa, Heterodera glycines; identical to SEQ ID NO: 162429

SEQ ID NO: 169354 - protein, 82 aa, Heterodera glycines
CCQLLSVPFSLPQFIDKLGHSLATFRASSTLRICTTLISPKRSVNQEIRISCMTTENHRRHNQQFPCALRALPCRFCPPDAS

SEQ ID NO: 169355 - protein, 156 aa, Heterodera glycines
MPAPLAVQQKMISEDGSDANIPQQHFSANGTPQQPPSATVPPAAAAAHLLKNSLSAPLLANLPPVPPQCGPPTVSLALLIDFAIHWNYRQFEILSELNSKKKETDRKISVVEFAHNTRLIFVRLLAIVRWLKSAKKFEPLASIRHLLDEQATRYVE

SEQ ID NO: 169356 - protein, 159 aa, Heterodera glycines
PFWFFFRCFSAPPLLSPTFPNWAIRPRVSRPSLTGSRSAETHGKGKLRRRRLPKSDGAKLKRIISKLGYQRFSPQAPLCHPIDISLCRDIPYNRTILPNPFIDGLDPQSLQAQTEHFKPLIRTKCSPHILFFVCSVFVPMCPAQLPQAVTSCRSVCEEV

SEQ ID NO: 169357 - protein, 156 aa, Heterodera glycines; identical to SEQ ID NO: 163267

SEQ ID NO: 169358 - protein, 247 aa, Heterodera glycines
MLLRPCPSLPLLSNALSFVVHLPFHQQKTISTSVFALTVFDPRIFTEPIVSTEELNKPLPPNDKRNYMYLKPMLFDQTPVFYRDEIVDKMVRVFLMEGKKELSRVNVLSALEIVKRTQYEKWLNEKDEKRRAEIILDPIEVANRAILNCRPLMKLEKTIKAGTLYLVPMPISEKVAIFKAMKTMRDICRLKAGKKRNEKRPHYPHFKDVLASELLAAMENEGLTIQAKQELHKMCEQNRSYSSMKKF

SEQ ID NO: 169359 - protein, 213 aa, Heterodera glycines; identical to SEQ ID NO: 163266

SEQ ID NO: 169360 - protein, 211 aa, Heterodera glycines
MCASAALSAFAFLDDSEAEIDWDERCPIVYSEDYNISFFGIEKCHPFDSNKWASGALVESAVLRPIEAKKEHLLLVHSKKYLRSLNGRFTLTRILEVGLVLLFPICLIDRRILRPMRIQTGGTVLAARVSLIRGWAINIGGGFHHASEGKGGGFCVYADVTLAIKLLFANELIKSAMIVDVDAHQGNGHETDFASDSRVYILDLFHASIYP

SEQ ID NO: 169361 - protein, 93 aa, Heterodera glycines; identical to SEQ ID NO: 166234

SEQ ID NO: 169362 - protein, 237 aa, Heterodera glycines; identical to SEQ ID NO: 163264

SEQ ID NO: 169363 - protein, 155 aa, Heterodera glycines; identical to SEQ ID NO: 163261

SEQ ID NO: 169364 - protein, 158 aa, Heterodera glycines
  unsure (1)..(158): unsure at all Xaa locations
IKNFKYSYLLQMSDCMTDDDAEEALRQFAEITNTDEAFAHFILQDVNFDLDRALARYYTADDPEASYKKFQTEGLDSAQNTGSEVDDEEGSGGTPNDKSKGKQPPHKRSRHEDESKESSKFPAELTLXHLECGRDGRTQFEQTILCGALHNCKNEPRS

SEQ ID NO: 169365 - protein, 335 aa, Heterodera glycines
MTKKGDDESGGEAAAAIRVLVTGGTGLVGSAIRQVVTEEEQQQKPQRLQEQWFFVGSSECDLTDLEQTRALFRRVRPTHVVNLAAMVGGLFHNLRHNLQFFVKNLAICQNVLQCCHETDVERCVSCLSTCIFPDKTPYPIDETMVYNGPPHDSNFGYSYAKRMIDVLNRGYAQEHNRKYTSAVPCNIFGPRDNYNLENAHVVPALIHKCFLAKRDGGPLVVAGSGKPLRQFIYSLDLGRLFVWAIREYEDVEPIILSVDPSDEVTITDVVTAIVKAMQFKGEVIFDTTKADGQYKKTSSNAKLRARLPDFKFTPFERAIAESVQWFEANYEKARK

SEQ ID NO: 169366 - protein, 160 aa, Heterodera glycines
HNSTNLMELLSQQSAKSAAPVDGPQKLWHQINDENGTEACDRHNNGRRCCFCLDCRRRHCSFTISPIDGMEWLQQCHPSYGVDADLSAKRFLEEKKLNLSRRFQLIERGYVLKLKNDDGEGPGGGKAQRRRCSKCGCKGSLFDQLTVRLIAGSEIENEGK

SEQ ID NO: 169367 - protein, 146 aa, Heterodera glycines
NDSRVHLYDLPANGGAFVEKKVLQHAGAITSVNFSPNGKYLVATDIARKVVPYSVDDGFKVASEKEWSFHTARINCCAWSSNSRYIATGSLDTNVMVWDLQQSGEHPLVIRGAHSMSAINGVAWLSDNRLLTVGQDSNVKQWTLKL

SEQ ID NO: 169368 - protein, 411 aa, Heterodera glycines
MIPDSAYIEIMKNCSKWNSRTMGGRTRSQTAVFDQQTGIVHRPTEHLFRHPSERCRAQNPMQVFTYPPVRWVKPKNNPSAGIEMNYFMRANPSLKSAISSSVEQPQNASSGEQQIAEAQQQIGTNVPSVRSATGGSGTKSYIENELDLAEYDLDELETNDQSDEEDWGASRKKRKKTGPGFGGNVPGRTARKVPSNISSATAKKEQPTDNGSNGGTPTAANVIGGGAGVATTATETRPYVCQLCGAKYKSRPGLAYHKLHVHQSDSNNETPKSPIISPKVQVSEYCDFCLGTNLQNAEGEAEPLISCHDCGRSGHPTCLKFTKNMLVSTKRYGWQCIECKSCAICGTSENDDQLLFCDDCDRGFHLYCLKPPLKEAPETDWSCHLCVKEFGAEASIAKATKSTEDGTSSPA

SEQ ID NO: 169369 - protein, 109 aa, Heterodera glycines
  unsure (1)..(109): unsure at all Xaa locations
APFINPDEQSMIDWXLINFGPINVGISVPPDMKPYKSGIYHPSDFDCQFKVVGLHSMLVVGYGENIYGDKYWIVKNSWGQKWGQEHGYLNFARGVNACGIEDEPIGLMA

SEQ ID NO: 169370 - protein, 160 aa, Heterodera glycines
TQIKMFFLCPPIVLLPLTLFCVASHGLTNHSKAFGNESESNRTDFFGTEPMEIPRHKSADGFDPMVDDVFALLSAGEEGEEEGNGTKVGITVEEEEEEEEQQLLLRCADQLSPFVPLLLVPPHYHRWDFSCHFQGNQSEKPADLSPNNANENADLFLKMS

SEQ ID NO: 169371 - protein, 161 aa, Heterodera glycines
IRQSTFNHQKALKNLTAIKEYVAHLEHFFDSPQMKEHLKTLESFPEAQLPRNFDARDKWPMCPSIHAVPNQGGCGSCYAVSAMGVAADRTCIHTNGTDGTQLSALDVIECCEVCGNCFGGDPLKAMVYWALEGVVSGGPDGCRPYAVSSACGTPCTPNLYA

SEQ ID NO: 169372 - protein, 135 aa, Heterodera glycines
RTVENFCTHARRGYYNGHAFHRVIKSFMIQTGDPTGRGTGGQSIWGGDFEDEFHPALRHDKAFRVSMANAGPNTNGSQFFITICPAEWLDGKNTIFGQVVEGFNVVQKINQVPVYEKSGRPREEISIISISLKSV

SEQ ID NO: 169373 - protein, 39 aa, Heterodera glycines
MDNYKVNPKDIGFLAVGTETLVDKSKSVKSVLMDLFADS

SEQ ID NO: 169374 - protein, 105 aa, Heterodera glycines
LINDQSDGVLYISKNGDFCNFKFAGPFKIACSPSPFLPRKDRDRSMAKMSGQWHFGRSVPKDVLAIGFSFVPSLFFFLLFIIRHFLLPLTFVCLFSPHYFFFRLN

SEQ ID NO: 169375 - protein, 86 aa, Heterodera glycines
MKPSFNFNLFASVFLVLCVVSLVLCEHKRAAAAEACNPPKDVGTGNLALKRWWWDGHSCKQFIYKGQGGNTNNFPSKKHCVQVCKP

SEQ ID NO: 169376 - protein, 216 aa, Heterodera glycines
MSSHCKTLEEDEEWMANLHFVRSDIDPATVKPIDSRQLASLVNEFLLRSADILNRFCAQFENRMMELDFRLDTFERMLALMERKLENVNVDEVKKQSAEEKETAEKAEGMTRKEKGEETPEGTGEEKRTDKRQGKETAAEGTTKANEHPKLAKYFKMLKMGVPEAAVRQKMRSEGMDDALLNDPEKELPLESPQNKAQMVHDALAEDDESSSNSDE

SEQ ID NO: 169377 - protein, 207 aa, Heterodera glycines
MSDHFWDENVFDLIVELEKEGRHVRLDWLSSNSALVDRFQTDIARLSEEEYSLYAASSSKLQRIAAAECAYKYNRTEELDKLFEKDRDSEALRETNVRHFLINRILDEFRPNIRRLSALPIERTIDAFCLNQPKDIEQHVLDVYDFLMDCLELRPPISADLRWLWICVVTGDQADQNDDGQVRDNVRKFIDKCCNIFRNDVRSDQYK

SEQ ID NO: 169378 - protein, 87 aa, Heterodera glycines
KRMDEKYIKNGQINANEKAKKRERKYELMRVQQNAMGCPKNPLGQVDSNPSQTIVFGPAQRSSVAPPTHRSPPIAALYCPPLSMIRT

SEQ ID NO: 169379 - protein, 146 aa, Heterodera glycines
MVHKQNQLETTAVPIAVAHNDNGTADIFEQFEIMFNGDKSVFFGNETVTGSLKIKLKQETVLNAIHLHFICVAKWIGTGRKEDKEGQTEKIYFDKNFVLLERPPGHPGPGHFKFVAHFAYSLPFECPLPSGCETSYESGSAHIRYF

SEQ ID NO: 169380 - protein, 128 aa, Heterodera glycines
RLLSSLSAALLVDDHVYDVDAHPSRLPRVRPLVLRSPPVASVLLVYEHIGNVRRAATARGRRTNATAVTAIGTAAVFSAFNALRHINFVFLQMNGRKNNGHQNEQKKDHWVRWIHIAKRELKRRSAQG

SEQ ID NO: 169381 - protein, 102 aa, Heterodera glycines; identical to SEQ ID NO: 163248

SEQ ID NO: 169382 - protein, 113 aa, Heterodera glycines
HGKVDKVKRIKDYAFVHFEERSAAVQAMEALKNTEVDGAPMEVSLAKPQGDQNQKKKLAIKSRFNPQQYGAGVTPGIGPRGRKGYEYMGAFRGGRGGAGPSMHMGYHQPYPGY

SEQ ID NO: 169383 - protein, 161 aa, Heterodera glycines
FNNLSSKFLKNGPFTKVALPFFSRFCFSTEAFEKAQKDMKQLKDEPDNDTKLELYALFKQANEGDVRGDRPKMLEFVARAKFFAWEKVKGMPKADAQHKYAEIVNSLLKNAGINNANTSETESDGIRRTKEGKVYKIELNRSDKYNAITWEMYEGLISALG

SEQ ID NO: 169384 - protein, 36 aa, Heterodera glycines
LIQINNSNLRRIKLISRLKNRRTVLKRKKTKNFTYL

SEQ ID NO: 169385 - protein, 146 aa, Heterodera glycines; identical to SEQ ID NO: 162387

SEQ ID NO: 169386 - protein, 309 aa, Heterodera glycines
  unsure (1)..(309): unsure at all Xaa locations
MSVSWGTQYSKLKTNLRLAANRLRLLQKKKTEQAVKARCEIADFLSTDKEDRARIRVETIIREDFVVEAYELLEMYCELLLARFGIIQQMKELDDGIAXEAVSSLLWVAXPRIGHEIAEFKVINDELTHKYGKQFAEAARMNQLPEPSRVSTKLVQKLSVSAPSKLLVEKYLVTIAQSAGVDFAPDAKVMREDDDEIARAERNLINFMNEEQYGWTVRHNDDPNSKGSGGGHFAAAVAGAVGPADPLMNQGSNNNNGGGATAMPMPPNGSGAFAMSPSTFVPSHPSPLATSSSPPPEYAPPPPLPAHGA

SEQ ID NO: 169387 - protein, 92 aa, Heterodera glycines
LSIIFPYFSNFLHIHSNSSTQNAVVPKASFLAHFLNPFGHILNRPFITTLPFSSVRLPTPTLQLLLDFFIAIETGSIKILMNKKKKIKANID

SEQ ID NO: 169388 - protein, 161 aa, Heterodera glycines
GINITFVAMLPSNLFFLLMTMLSSSLLHQTLANKFSAETDAVNPTRLIQRRHLIRSRAIHKEKMHSNVNEGYLQWEKDKFHEALGEKCGKKSNWEQRDFGILRILPKSSRSLMDPKFLGSVEPRLLKTSADGTRTKSDSEEEKWRNWLRRHFPAARTISDQ

SEQ ID NO: 169389 - protein, 87 aa, Heterodera glycines
VEQCRATTTTASNGCDVMKTVGRSAPLLLLFLVGLFGVQTSCWVPSFLLYSIRPICGHSTATFKQIWTRRIRTNNGTSFSSFLFVEH

SEQ ID NO: 169390 - protein, 209 aa, Heterodera glycines
MHPYEFKLDAILSRSELPVEKLEKHAWNPEDRSLNLYVKEEDVLTMHRHPVAQSTDGMRGKVGYTRGFHVWQLNWPVNQRGTHAVVGVATKDAPLHAPGYVSLIGADAEGFGWNIVENKCYHDAQNTKPWSFPYEQPFVAPEKLFCVLDMDEGQLAFATDSKYLGVAFRGLKGKKLYPAVSAVWGHCEITLRYLGGLDPDSHLMDTCRR

SEQ ID NO: 169391 - protein, 168 aa, Heterodera glycines
ISSTCHFGDRWMIDDLPAALRGAGKKHPQQFGKSDLVRRQLQSGPIGFGFETPPHRGFFDGAATSKGCTPPIGTGSCGKHPQPTRNLLTLYTTVIAYLTVDYLFSLFLSICFQKKLGNFLIFSFFSCKGAKATKEIQIQLRDLSYKQFKVRFLGTKQNANLQNAIKGS

SEQ ID NO: 169392 - protein, 155 aa, Heterodera glycines
MVFVKAVKNKAYFKRYQVKYRRRREGKTDYYARKRLVTQAKNKYNSPKYRLVVRITNADVICQIVYSKIQGDFVLTAAYAHELPRYGVKVGLTNWAAAYATGLLVARRALKKLSLDDKYEGFVNPDGTIAEVEPLEDGPRPFKAFLDVGLARTTT

SEQ ID NO: 169393 - protein, 159 aa, Heterodera glycines
MLSRSPEMEEERLPIVSMVIVADKSRAPANFITLTKTYDDGSDADLWKDGFGFGLFNRSVRYIAVSRHIAETPPSGLEVLTDVAVISDKEAVPSSFVCLDFTVDTKERALKKKYLCARFTPRTDAIDAVTNLIVLARSRRPPKGYTLAGDIDGMAICFR

SEQ ID NO: 169394 - protein, 199 aa, Heterodera glycines; identical to SEQ ID NO: 164031

SEQ ID NO: 169395 - protein, 163 aa, Heterodera glycines
  unsure (1)..(163): unsure at all Xaa locations
SFSVDLEQLEKEIQAKEAASKRDNVTDTKVQPDLKGNIGSGTSAQTKRKSNVVGLEEDFDTLDEPICDTLXRDLKILYGKFSQVLFPAKSEQNVLTDWDLWGPLFICVALSILLQGADRGAQFTQIFSLAFFGTCIVTLNAKLLGGKISFFQALCVIGYCLLP

SEQ ID NO: 169396 - protein, 235 aa, Heterodera glycines
  unsure (1)..(235): unsure at all Xaa locations
MLTNKLAKCAAMTMTRCQPLNALAMLGGARLCHHTPPNCMDAIRPLGPKSSVPSFKGQAIVNAEMKTISYDDYKGKWLIFFFYPLDFTFVCPTEIIAFSDRVAEFKQLGCEVIACSCDSQFSHLAWVNTPRNDGGLGKMEIPVLSDFSKKIAADFGVLDKETGLSYRGLFLIDPNGTVRHCLVNDLPVGXRSVDEALRILKAFQFFEKHGEVCPADWEEGGETIDVKSPKEYFKK

SEQ ID NO: 169397 - protein, 146 aa, Heterodera glycines
FWQNRIIYWERKNRFMHLIIEIWKKGLKWGRKGGIKLKMNVYFFGIHPEFFFFFFFFTHSLHSLFTTAQNALIPSAATGTDVERCFGFLPAFVHFLVVPTGHLFIPISRNKIGANEKADNYQQKKHNETQMEHLEKAENYLKLLKA

SEQ ID NO: 169398 - protein, 159 aa, Heterodera glycines
QLSAVQPEIEQPNEGDADGEQQPAEPIQLIDKEREYLAVKAASRAVISHLSEWSTPIEMRFAMDGTVETKRKMRRRFCIDRQQMLHDIECMYAPKIGIKQILNVDIVGCQDEISQATENVYQMVYDGGFFRKQTGLCNFKVLKPTPTTKNVLDNVINGI

SEQ ID NO: 169399 - protein, 77 aa, Heterodera glycines
KKKKKKKKKNSRGGPVPNSPYSESYYNSLAVVLQRRDWENPGVTQLNRLAAHPPFASWRNSEEARTDRPSQQLRSLN

SEQ ID NO: 169400 - protein, 54 aa, Heterodera glycines
GVTHFPFSSFLSVVITTQFQFVNSFFTHRRDDFFKIANASCDFQYCFNYCYCWP

SEQ ID NO: 169401 - protein, 133 aa, Heterodera glycines; identical to SEQ ID NO: 163234

SEQ ID NO: 169402 - protein, 158 aa, Heterodera glycines
MAATSATGFPVCILTPCSNSHPFEERRILVTRTEEDAVKIGRSVVRLQPSSNNAIFDCKVLSRNHAVLWANGAGHFMIKDTRSSNGTFINNERLSASGEENEPRELFSGDILQLGVEIIDTAKKVASGCVTCIVRLLNERGEECAGRPKPDHGTFPTL

SEQ ID NO: 169403 - protein, 201 aa, Heterodera glycines
MTTEEPISGGQPNTPPIPAIELSYPVSVIYCGECSMPVEYCEYSGKFERCQQWLERNLPDLAEKQMKIGAGDGKAAEEGNGEETEAKKHQKRGGKGLPKASGGGKGSKEQSAAVPRITLKTEVRSKNKAVTVVKGLTTCGVDLKTASKFFANRFACGCSVTVGSADELVIQGDFKDKLFVEIPKKWGVDEEVIEDLDDQKK

SEQ ID NO: 169404 - protein, 206 aa, Heterodera glycines
MATTDGMVEDGKVGNDLQSAKFTKDKEVVDIVQPTAKLIGLTKEQLEQYRNDPFWKAIRYSLFVAFWLIWLAMFVGAVLIVVLSPKCQQVNWTEKMVAYKIFTLAYKDSESKNGFGDFEVIEKKLDQMKGIGVNAIWPTPVLKYYKNALGPEAIEKLEVSDQLGGAEGFKKLIKRAHDNQIKVIVDLPLTVNAKGNWANKTSDTKN

SEQ ID NO: 169405 - protein, 383 aa, Heterodera glycines
MASEDASKIVTEQRNFFKTGATRAAAFRKEQLKKMREMIVQNKDKICEAIYKDLRRNKETNMKMEVDGPLQAIDYCLSELDEWMKPQKLDDHQLGKPLVIFEPKGVVLVITAWNYPAALAFQPAIEAIAAGNTVVIKPSEVSPNTSKLLKEMFDATFDKKFIAVVEGAAPETQALLDQRFDHIFYTGSSSIAKLIMQAAAKNLTPVTLELGGKCPVVVENDADLEKAALRIAEGKWLNSGQTCLAPDYVMTTAEMKPKLVNALQKSIQTLYGENPKKSEQYSRMVNQRHFDRVKALLDKTNGKVLYKNGEPDRDDVFIPPVLVDTDLKDALMQEEVFGPVLPILTVKGLDEAMDVINDGEKPLGAYLFTNDQQKVDKFLNETS

SEQ ID NO: 169406 - protein, 160 aa, Heterodera glycines
HLDNKILTAWNALAISGFCAAAQAVPTRAAEFQKRAEKAVAFIRSHLFHGGELLRSAYLDNLGQVVQIRHPIKAFADDYAFLIEALLSLYSLNLDENLLQWAHNLQLQMDELFWDSTFDSGYFMSRVGDPSIIVRMQDEQDGAEPCTNSVAASNLLCLGF

SEQ ID NO: 169407 - protein, 118 aa, Heterodera glycines
TLSAIFLKNPDNNKKINYHIQQKLLVINQFVCSVVVAPHLSVKKFSGMTGREAESGSAKMSGIFLNNEVPFPVNIRLLMTLFILISVQREFCHVTFSYAKFSNSVDKDGNKRKCGIMP

SEQ ID NO: 169408 - protein, 116 aa, Heterodera glycines
HSLASITSTPTQSTSQNGLPFLLLPDLPPIPRDSPSRRCRLRCHLIRYLLIHGQDLGRSRLAHPSKPRPHHLGRAPQAVGGGQEALSCSAVSSSRPQPDPLHTKSTHHPTFFRLPT

SEQ ID NO: 169409 - protein, 152 aa, Heterodera glycines
MSNSNDSDDLIIYDDNEDIKDVSSDSGDEVAMEEVTNAGTSTAGALSNEEIRDYQVLSQTELVDELNKLSSETSAVLRFNGSICKVLLHHFKWNKVTLIERFFEFPETSNTDSFFRNANLLDPTKHTKIEGKVDYCKICYDLRQLTGLLCNH

SEQ ID NO: 169410 - protein, 211 aa, Heterodera glycines; identical to SEQ ID NO: 163229

SEQ ID NO: 169411 - protein, 172 aa, Heterodera glycines
MPSLLLNPGPSTMNFFSSSLPLPSFFFRNRKKCYDLNPPEESHQVTYLGNMLTIMGKGDTSIDRPLEVITRAWGATVAKGATRHGAGATFGQQQAQQLAMRLCVCRSGLRAETCIGVTEYFTHRITWSAAPSQYPRVFCWIYKHEGKRMKPELRCHAVLCRRADEPQQMHQT

SEQ ID NO: 169412 - protein, 140 aa, Heterodera glycines
TFSSVGTAGQRCTSTRRLIIHEKVYDVVLERVVNAYKQLMDTRIGDPLDERTLIGPLHSRESVLKYKTAIAEAIATGGRILCGGKVLEESKGNYVLPKVITGLAHDAPVVLRETFAPIVYAVKVADFEEAVAVNNEASQG

SEQ ID NO: 169413 - protein, 153 aa, Heterodera glycines
GIHPFCNIGVLRKTDDKSLMNGQLALKGCEIMALYFGAHMSQRCREFIPVLKQFYDQLKKSPDAVPFEIVFVPFDRSEDEFRNSLRDLHDDWLYIPYGSVHINSLAARFKIINWGVIPTLVVLKEDGTLITMAGEANVKYLSASEAMVRWRSL

SEQ ID NO: 169414 - protein, 153 aa, Heterodera glycines; identical to SEQ ID NO: 163223

SEQ ID NO: 169415 - protein, 131 aa, Heterodera glycines; identical to SEQ ID NO: 163218

SEQ ID NO: 169416 - protein, 216 aa, Heterodera glycines
SCRIRHEAYVFPFLFLYFKFTANFLELLHTMSAIENDETKSRIWQQLKTKLHSTMVAFGSGSVQLPKLMDTFRHDWGSELTSYAVQLGFGCNDAAVYKMLLTMPDEIESGFISATGTFAFKVIPKAETSENLTKIDQSNQYQDEMRRIFARRRSSMSSGFHRSFPFNQSFHVRPPVRMPPPPPPMPFNLSAPILNGPKFPGLVIQLPNCADAQRRV

SEQ ID NO: 169417 - protein, 65 aa, Heterodera glycines
  unsure (1)..(65): unsure at all Xaa locations
XNCYFNDKSTFFNGLINTRKCFCHKLLLSSTLTRTISTRPKLAPPHLLRARPNFQSEHWHLNGRR

SEQ ID NO: 169418 - protein, 211 aa, Heterodera glycines
LTPVGPSVAPLAFSSSSTDASAVELPYAVPNFGTPTEKLLLGGELIAVPSALLADEKIFRSVLCPKSFWSLSQASRDHLEHFLPLPSISSAIKSSSVSVARRNCGAPLDELLSCAFTSDPNFCFGNPLAKFFARIRNGYFSSPEQVQLRDHRRVLYDHYIRHYQMNLLKTLLINSHVLLEQSTMLNSFDEHVRLNPRTFCSLRKLAKHKEV

SEQ ID NO: 169419 - protein, 210 aa, Heterodera glycines
FEAYIRLDISKLITAESRMTEEMRSLVRTRNNFEVERIKLTCEQPLAQSVADAVKESEELVNVEQKPKKIPIWRRKDSELFSRPCTFLEDTRFYLLSKRQPIPAALRRNGLTSKAIDAIVKDLFGKAKSGEAKSPSPMDHKPFSAKSSTNANTAAKTPATVGKRLRKARLRKLQSANPSTSAAKLLVSLEPLNRKVPPQLRQCNFTPNYA

SEQ ID NO: 169420 - protein, 227 aa, Heterodera glycines
MPKSKRDRVVSLTKVKKKSREGKENILKEVRECVGQYKHLFVFSTENLRSARLAEVRQHFKQNSRIFFAKNNLMAVALGKSAQDEQANELHKVSALLRGQSGLMFTNAKANEVQRFFAEHTEAEFAQAGAVASADISLPAGPMPAELHLHGAMEPQLRKLGMPTRLENGAIELLEEFTVCKTGDQLSADQARILKQFGHRLAQFRVRLLARWSKKKGFEQIDGGAEE

SEQ ID NO: 169421 - protein, 111 aa, Heterodera glycines; identical to SEQ ID NO: 166179

SEQ ID NO: 169422 - protein, 151 aa, Heterodera glycines
MNRRWVCTDVWMDILPFFNRLQLGLKLALLSPRFDVLVDKHFDGKCELTIWRHINILKGAGPEPELSVRIDRKTMKFPLPDRPLPTKIRIKDLHIEYTDHSVITFLRANQQIFDKGIDLDLYWDDALHDNNSDDVQQIWDVFAREIWPIFA

SEQ ID NO: 169423 - protein, 129 aa, Heterodera glycines
  unsure (1)..(129): unsure at all Xaa locations
MNRRWICNDVWMDIFPSFDRAQLGLKLALLSPRFNALVDKHFDGKSEXQFGDQSIISKDKGPEPKLSVRIDDKFVPFPFPDDRPLPSKIRFKDLRIDYIDHSVIAFLRSNHQIFDKRGINLYLWIPSPH

SEQ ID NO: 169424 - protein, 121 aa, Heterodera glycines
VLSHVLGQARALPRRLITATDVAASTNTPLVTARKTGNETTIPSQCVMCLPQQPLNDAQTPTQPLGRPTSVHPTLAQRTNQARQPATDTLPRSSHTQALTCAALSGIPQLQRMEAPQKHGS

SEQ ID NO: 169425 - protein, 253 aa, Heterodera glycines
  unsure (1)..(253): unsure at all Xaa locations
MFPAKYKAFRLENKVAVITAATNGIGLAIAERLGHEGARLVVSSRDEDNVKRAIDRLVSSGLKRSDLAGCTCHVSNSEDRSRLLKLTIQRFGSVHILVNNAGINPIFGDLLDVDESAWDKLFDVNVKAGFMMAKLFAPEIEQSGGGSIVFNSSIGAYRSPQGIAAYGITKTALLGLTRALAESLAPKGIRVNAIAPGIIKTKMSKALWEGXTNGPVTXAIVTLMGRLGMPEECAALLAFFCSSDASYITGETV

SEQ ID NO: 169426 - protein, 162 aa, Heterodera glycines
MMSSSSFEQLSCEIAELEKLRQQSQLPNVQKAIDELIGRWKVKKEEQKMKTDKGTAETLSAPTEAPKLISGSVHVRPTKKLTTYAFDESDKFVKLYYSLPGISDSVPGTISTDFRENSFSIVCSDVKGIDYEIRVQGLCQAVEPEKCVVKQKSGDQLLIMLK

SEQ ID NO: 169427 - protein, 118 aa, Heterodera glycines
  unsure (1)..(118): unsure at all Xaa locations
XIFKNFQLIEKYKSASIFLHHAIPIVRLFVPSFAWHCRQFVEGTLCQVEETVYVSWALTVGRQHVFPPFRCSIPRKICRHWPINLHILMDSLLKKNSHVWCDSRKMRRIKLSIMNFKP

SEQ ID NO: 169428 - protein, 154 aa, Heterodera glycines
MSLQCLTQEEVNTICKDVLENLIGASTYQHTEAVKWNQSVVEKITARLVQLQKPYKYCVCVILMQTGSGAGLSVASMCFWDRRCDNSFVVRWESKAVTAVCNIFAIAVDSGAVSPVPMMDNDAATDGEGGTVAASATATTNGGDIVGGGKSECE

SEQ ID NO: 169429 - protein, 183 aa, Heterodera glycines
LIILQMKLFCPFVFLVLLSATAFAFSNLNKTPKTVHWEDACDECQLIIKRVVNVATDPEKVAELKILLSALCQETSYVEECRLFVSKLDLFLGRLLPFLRDAHHVCKELRICNNGRLQQFHVLGLHFARVNASFQRKDLICEECQLAARELAREVSEPKFQQYVEEWLQGNVCVHLGTLKSSC

SEQ ID NO: 169430 - protein, 200 aa, Heterodera glycines
MSSKRVRFTEERNATERVKRSRTEAAEEEKRERLDDEEDGGPAETAEGMKTKRTKKHTLDSDEEDETEGYQRLDMDKVEGQEESTLEYEGHVKIMPFNMKDDLEEGHFDANGTFIFDKKQSVIKDAWLDNIEWDNVKNAAGKHWGKLDDEDDKKADDEKEVEPKEVYRRLVELLNEKETIGAALKRLNNEKKSNAAEERK

SEQ ID NO: 169431 - protein, 203 aa, Heterodera glycines
MFAGIDGQQNLLLSAQLQRLLCHHGETANAFVFCHQMQPELQKGPTCGFAVLLMALRCSVGDGTLDRLVEMGKHFGITYNGELFSADWMCEFVQKHWPNACELRVAQFPSPNSIVRHLISGKKAHHQCTTTVLVPYDCDKNFEPCNRQGVAAHWAIIIGFVIFDVTAQNGPENQNAKVIAFDENDFRCDGFDNEHLLYLIALQ

SEQ ID NO: 169432 - protein, 152 aa, Heterodera glycines
MFELADQSDGTSGIKQLWALIDPIWKFDRAELVDCMAKRVIYETDDLIALDKPFQMAFSSGPDDQPQLDRILQDLKKHIAPKIDRLFLVSSLDKNCSGVIVFAKSHVKQLEMKAQLQNDALLFRYRAICKGVPKLAKARISIPLIKVLRGSN

SEQ ID NO: 169433 - protein, 91 aa, Heterodera glycines
FAMNKKFINALFHQQMFKNAVLLPFRHFAALTATQTHIDPVPLSFLRQSEDESEQKTTIMPKWKEEGLKIERNCSNRIFQTIAKDVKLLTN

SEQ ID NO: 169434 - protein, 68 aa, Heterodera glycines
RFDFFERPKMNHMAKIFIQNWHFKFFLIPHFLLYFSSFCNIFSSAFPILAFLYKLIVSPSQKRKILLL

SEQ ID NO: 169435 - protein, 58 aa, Heterodera glycines
PIYRKSDLHTRSKVVAVCSRGGPVPNSPYSESYYNSLAVVLQRRDWENPGVTQLNRLA

SEQ ID NO: 169436 - protein, 161 aa, Heterodera glycines
MTSNSTDGWGCNNSGWGQSQAKMTSNSAADGWGCNNSALRPNQAKMTSNSAADGWGCNNSALRPNQAKMTSNSAADGWGCNNSALRPNQAKMTSNSTDGWGCNNNGWAPSQAKMTNSTDGSGCNNSVRGPREFSRSFSGRPGFNRQPVPLMNKLPPIPPST

SEQ ID NO: 169437 - protein, 201 aa, Heterodera glycines
MPLFLGIDLGTTSVKIALIDGDKKTFLEWDRKHNALIEREEKDKHEQSPKKILDTVQKLMGEMETDKLAQVKGIGISGQMHGVMLWEADSIGLGVDRCHCSPLITWMDSRCDEQFLRKLPNIPLDSVQKCVYFLTKCRVVGFRLRLHLDRPTDKLIDALPLFPISFCFSSRPFPHSFAALHRFPRHFHWPHFASLRPFAKR

SEQ ID NO: 169438 - protein, 39 aa, Heterodera glycines
PGLVPRGAPRVGPGCPFGPGTVLYTTPFCPGCPGCPDPP

SEQ ID NO: 169439 - protein, 235 aa, Heterodera glycines
  unsure (1)..(235): unsure at all Xaa locations
MATKAGIFIVSAKRCAFGAFGGSLKNHTATDLGEIAAAAALKSSSIAAEHIDHVIFGNVIQSSKDAAYLARHIGLRVGVPVHVPAVTVNRLCGSGFEAIAQGGQQILAGDSKVVLAGGTESMSQAPFAVRGARFGTQLGAKIEFEDVLWQGLTDXHANMPMGITAENLGAKYNVTREEADAYAIRSQNRWRLANNAGYFKSEIVPVKLQGNARGKTVQGTNPRESTADKWQLKPF

SEQ ID NO: 169440 - protein, 62 aa, Heterodera glycines; identical to SEQ ID NO: 166156

SEQ ID NO: 169441 - protein, 41 aa, Heterodera glycines
PSKTKQSIGPHNISTHNNIYLLSKILHVTLSQRKESKVAKL

SEQ ID NO: 169442 - protein, 68 aa, Heterodera glycines
MDWGSDLEVDTEIPSLESLVSWEILKHLKPKEKKRQEVVNELYQTERTHVLRLKVLYKVFYRPMVLQR

SEQ ID NO: 169443 - protein, 132 aa, Heterodera glycines; identical to SEQ ID NO: 163202
  unsure (1)..(132): unsure at all Xaa locations

SEQ ID NO: 169444 - protein, 149 aa, Heterodera glycines
MASIVDSAKVNNFGIGTVVEPILVNKNGSTGGGGRRKNKTLFGISQAVHAEHPQQQLSEFAGGISPVDAVPMPTAANDCNNNSIEDIQSDRRRGPIDPTNFDHLVRLSELIRSMADLGTLQPEFGIICGSGLGAIADQMEGARILPFSE

SEQ ID NO: 169445 - protein, 48 aa, Heterodera glycines
VGNIVRTMCPLRNCSLCRSNAPNNASEERLNTPTMRPTRHSNSTNICW

SEQ ID NO: 169446 - protein, 162 aa, Heterodera glycines
RKQRFLFFSRFKMSLFLLRALPLFFLFSLCFAASPFNFRANHSLGAETTQQIVPTVATETTDGPKPTENVPLMLENDNVTEVAKVEGRNASDSEIETREDQAFANITAHSSDNASLTESCGFFCRNVPLFVGFILTLVCVSLLLILSIVLYRYFTRRTYADE

SEQ ID NO: 169447 - protein, 111 aa, Heterodera glycines
  unsure (1)..(111): unsure at all Xaa locations
MAICSRVLPLDVSLAFTSAPPAKAPKRLPMSPPLTALNSVDRMSPPPAPPPKAPLPPPPPPRNPPINSPXPYLPTDCHCLRRPAAAXSPEFAPPPPPPPRSPLISWSIIEI

SEQ ID NO: 169448 - protein, 138 aa, Heterodera glycines
MGNCKPADATESENASSVETVEVEVPPDPLVNPFWKMQKAFEKKLRNLLKREKKLLQLKEERDSDKPITTDQHEALSKLDEVKTLIGFVDEMMKLNQQQFSQYKKAIKNRERQLKMQKARSQTGQQFPSRQSYVHCFN

SEQ ID NO: 169449 - protein, 172 aa, Heterodera glycines
FEPFDLFRFGAVNLDPLTETYGLPFYLHYLVNWPDYFMVAEHLSGDLMGYIMGKSEGRDQNWHGHVTAVSVAPEYRRMGLAARFMQKLELVSEKEDCFFVDLFVRISNETAINMYKRLGYTVYRQIVDYYSGDDTHEDEDAFDMRKALPRDVDKKSVVPLKHPVSCNEIDFD

SEQ ID NO: 169450 - protein, 46 aa, Heterodera glycines; identical to SEQ ID NO: 166147

SEQ ID NO: 169451 - protein, 104 aa, Heterodera glycines; identical to SEQ ID NO: 162389

SEQ ID NO: 169452 - protein, 92 aa, Heterodera glycines; identical to SEQ ID NO: 164021

SEQ ID NO: 169453 - protein, 205 aa, Heterodera glycines
MANPNSDHSLPLSPSPSPSHSSHSFSLRSVFAHHFCFFCSNSVLIALVVFTLSLLMAFLLGKRRSSQNALAKRRRDKSPEGIELEENPEVFKSSLLKDSKEHIISTYFPDVRTLFDAFQRGLKVAEHSACLGFRPAKGSPYQFLTYAEVAVRSQSFGHALISKLGLQPGNETFVAIYAQNCPEWMITAIGCTRHSMVIVPLYDTL

SEQ ID NO: 169454 - protein, 111 aa, Heterodera glycines
MQGSSARSFLNFKKKLQRKEDLEKEFVESGEKDRVQEVVERRLHESGWAKRVESMCEEYIAKKGYERVELQAMVDELKDASRRIVPDEVKRELMQLIQEFVNSRTSTGEGW

SEQ ID NO: 169455 - protein, 149 aa, Heterodera glycines
IVSLCLLISVKILRLTNLDILFRIRDGLRSGKPFITALFRVDIESQRHGGELVAEVLKAHGVRELFTLCGGHISPILVACEQIGIRVLDTRHEATAVFAADAAARLRQDIGVAAVTAGPGITNTVTALKNAQMAESPVLLLGGASPSLL

SEQ ID NO: 169456 - protein, 176 aa, Heterodera glycines
MECPPGSSFDPSPSPSVASQPFSEECHSPDNQISLDNSVPEESPNGNANVCMGEAKPRWGPTHAGAKQLASMYGKGKRLQEVTCICVASALFLSVGCSLLYHFRLVPVGQLILASLVGVLMADFNSGVVHWGADTWGTVDTFVGRNYNRSFREHHVDSTAITRHDLVEVNGDNFML

SEQ ID NO: 169457 - protein, 207 aa, Heterodera glycines
MANDSRSSSSASSRSRSRSRSRSPRRREQRRRRSRSTFSRSPSPGQKRLHIGNLDESVRRRDIEDVFGKYGRISDCWMASYPPFYAFVVFENNKDASACMKDLGNTAYIKGCRARVTVALPRKGSSLDANSMNGATYRRGPPPPPRRYYDEEDSHRRRRRSRTRSPRRRRSPSRSRSRTPPRRSRSPRRSARRQRSPSPKREPRNRG

SEQ ID NO: 169458 - protein, 150 aa, Heterodera glycines
MFRFSLLLLLVPLVRCVPNPKPLFGIGIGRKQSAGAEGKLTCAGEPLADVKVKLYDDDRGVDTDDLMGETRTDSEGRFRLEGYTHEITTIDPKINIYHDCNDGLKPCQRKISIMIPDKYIASGEHPNTYYDAGTIELEGKFSGETRDCLH

SEQ ID NO: 169459 - protein, 134 aa, Heterodera glycines
MVFFICDQCGETMKKKQVLQHIHRCRNAHYSCMDCQVVFDKNSYQGHTKCITEDQKYGGARHVPKVNKGEQKQDAWVSQVRAAIRQVDEPRLKNLLRSVQCHTNIPRKEAKFVNFLQNSLRIRDRALCVDAWNA

SEQ ID NO: 169460 - protein, 181 aa, Heterodera glycines
RFSSSNVGCFSAVKMTAAAKLSRFFRRLVHVRQMDFEFAAWQMLYLLVNPQKVYRNFMYRKKAKDQWARDDPAFLLLLALSLLGSSVLFALALNLSFSSFCAFFLWVVFIDCIGIGIAIATALWFISNRFLRRTRDCDVVEWAYCFDVHLNAFFPLLILLHVILPLLFYGLVDYQNFLARF

SEQ ID NO: 169461 - protein, 145 aa, Heterodera glycines
MKKLTVHPDIMDIVRELDDKCLRSIEDSYFDRMGQGPTYHTDENAQRPELLDENGHRYVGLFNQAMTCYLNSLIQTLYMTPEFRNKVYSWKFVDTPTNEDNKNIPYQLQRLFLLLQTSEKASLETKELTTSFGWVSNEAFEQHDV

SEQ ID NO: 169462 - protein, 149 aa, Heterodera glycines; identical to SEQ ID NO: 163186

SEQ ID NO: 169463 - protein, 262 aa, Heterodera glycines
MVTQNDHLMANLSDQLTNLQKELDTLKKDMTANNDAFFNCAMALIIFLMQCGFAFLEAGAVRSKNCTNIIIKNVLDSLLGIIAYAAVGWALAFGSNPLPVLEPYFGFSQFGMVGTTEFSKFFFQFVFCATASTIISGAVAERAEFACFITYSLAITAFVYPVLTHWGWTKQGWMAASGFVVDDAHQITYVDFAGSGMVHVCGGTISLIAAALMGPPIGRFPERTVSVPVGGPRRKQNEPKSVEIKRHSVPLASMWGFILIAG

SEQ ID NO: 169464 - protein, 111 aa, Heterodera glycines; identical to SEQ ID NO: 163844

SEQ ID NO: 169465 - protein, 158 aa, Heterodera glycines
MGKEQQKQQNKEKKVAAQQQQNTGDEAGTKKQTRLGLDVTKTENYSEWYSQVIVKAELIEYYDVSGCYVIRPWAYSVWEHIQAFFDAEIKKLGVKNCYFPMFVSAAALEREKTHVADFAPEVAWVTKAGNNDLAVPIAIRPTSETVMYPTFAKWCKSH

SEQ ID NO: 169466 - protein, 142 aa, Heterodera glycines
MAAATTTMPSFYFHKHFFQRIFPGKPFFVQVFSAGVLAATGDILCQKFIEKRDKWDPFRTSRFALTTAIVIAPIQFHWFRFMDRRIGNPKREGPAGKVTLQTGLKRVLVDQSLIAPALTAAFLFSVNFLDSFSTQNAIQRTK

SEQ ID NO: 169467 - protein, 69 aa, Heterodera glycines
VKGRLTTITKKQQQHFAPPFPRSAEFSLRPSAHFFACLRLRFSRRIRFLRHFARIFQCQKELKRKRGSS

SEQ ID NO: 169468 - protein, 73 aa, Heterodera glycines
  unsure (1)..(73): unsure at all Xaa locations
LRRXSXXAEKGNRLSTKTRLXSGRTRFPCSYLPLLLPPPAGGTHSVTSGSTPRWRRCSINSSNALSTSSQHVI

SEQ ID NO: 169469 - protein, 144 aa, Heterodera glycines
SSVRQTELSLERHEWQTVMCSNGVIACWHPPKQFPFEHSRTFNMEKAMSEKEKFLNRKPDQTLFTTAPDDNALCEIFHTEKQEWRPIYREKRLYNAKVEDQLKPILSNPLETPTAPVITKNVENEAHRIEQGVNEGNNPNILSE

SEQ ID NO: 169470 - protein, 198 aa, Heterodera glycines
DFGGKSLFKVLADSAFEKPSLVDIFFSSKLFQASLNDACEALIRTQSQQFKLLKKRNFDVIISEQLNFCGAGIGHLLDISVNIVLSSCSLQEHLASLIGLPFPSSFVPSLMDSNWSDKMSLLQRFQNLLHKFAGYNYLSFGIDPLTQIFRKHFGNAFPDLRSIVSKSPLIFVASDEFVDFPRPLFSNVIYIGGLGMEK

SEQ ID NO: 169471 - protein, 81 aa, Heterodera glycines
KVIWIPKRIWGESLAFAGILIGLHFVYYSMQNNPNLIPLNDRRELIYVKWIKEKFPSLGWVGIDDSEAMKRRERIMGQKEQ

SEQ ID NO: 169472 - protein, 72 aa, Heterodera glycines
NDQNKTMLNKEKMAKYNDKQIKIELTVTAQPKPNENRKSSKVEIEKSAFRHFLAELVRLAQESIEIEITLTV

SEQ ID NO: 169473 - protein, 93 aa, Heterodera glycines
NHRPTFAIGISAKSQENAFFALRKKRKKSGKKKRKRTKNEWKRENEKTGGAAKQKAKLPENVNNVSNMYTDNSNLEHIEHLLLILNIKYTKKP

SEQ ID NO: 169474 - protein, 159 aa, Heterodera glycines
FCFFVYLILRINNRCSMCSKLELSVYIFDTLNIFWKFCFLFRGSPRLLILSLPLILCPLPLLLPLLSQCKKRIFLALCRNPNCKSRAIVPLPVGVLHSKTDRTLHWRTFLADPRFWPFLLRDGHLEECRCFAQSIAVVFWGENAAFRNTNHCAKLLTES

SEQ ID NO: 169475 - protein, 126 aa, Heterodera glycines
EVYTGKIMFPGKSNNQMLKFMMDLRGKFPNKVIRKAVFKDQHFDYNCNFLYHETDKVTGKDKVTVLTNIKLLRNLPAELSGDQELDRDGFAKVDHFRSLLEQMTALDPSKRISCSDALKHPFIVEK

SEQ ID NO: 169476 - protein, 183 aa, Heterodera glycines; identical to SEQ ID NO: 164004

SEQ ID NO: 169477 - protein, 152 aa, Heterodera glycines
MSDFFLDNSDMDDNELELKLNNLQMLKNRRANKSLKMPPTDIGTTKLPVNGKGIGYRPLPENAQLKRDIETKMGTTDSEEKEKEPKEENRVPPNENGNGNRPLSDNAKEKNAQLKREIKEILGIIDSEEKETEPKETKFCEMFSWVQLFFGL

SEQ ID NO: 169478 - protein, 208 aa, Heterodera glycines
MPIQLCEHGRVMPGPFIRGEIKAVNTSAARRLIREFNVNTTLYTGANICVNCCSRLRDHQETRRRGRTEAILYYPEGATLFIKLNGDENDGNTTKGKKTTTGPSAAVTRRAASKGLIKIRICSDETINALKLRIYEKIDQSPVDQLLYMGGQVLDGNLTLERARVPANNFDNPLILIVQQRRKSGDDDDSDQKAGSSGGGGFHDTALS

SEQ ID NO: 169479 - protein, 149 aa, Heterodera glycines
MLESAVLFLLNLFYAFANFCLDLLPNSSPMGSKSTPATADVAYANYRLFDELNRKVRESLRKAIEADETRIAKSRVIGLYENVLKQINKALEIRHTSCPSHKQTEMQEQQKKLKAFVGQTKDRLEKLASIEPMALRATPLPLATVETGN

SEQ ID NO: 169480 - protein, 67 aa, Heterodera glycines
KFLHGLCCWSPKYSTVPRCTAKHMTKLPGTERPQMLRPKSIWTSPLGCSRACSHFDDPSRGPTVNSV

SEQ ID NO: 169481 - protein, 83 aa, Heterodera glycines
PRRKERRRPRPSPDVFRAREKFITSNPDLIESLRKQKFDVVIEEQLNFCGAGLGHLLAIPIHILINSCPLQEHVAYLFGLPFP

SEQ ID NO: 169482 - protein, 154 aa, Heterodera glycines
MATQSNFGKFQQRSSRQSSRIISQQPTKCFDEAAKRRRIQQQLESLEKDNFQEDPHANITWHKAAPKFDDEMVFGDKEKKRRKRKIASPSKVSGAEQATKKGKKIVAALTKTRFRKTFAQLLEEAQRKREEETQQRRKEASPELLLPTYYEVAS

SEQ ID NO: 169483 - protein, 199 aa, Heterodera glycines
CYIFCFRIWVATASTASYRTAGPKTKVPDKNEWMKRCAAEYERKYCVETDTKLKQQTTKNKEKKQQQQQDESPEEYYPTNYEPAFNYDKLHVSDITLPLTIHQKDQYQAQNGPTKYEPKAEGQHVTSSVTTAEAGKYSSSSGHASSSESEEEDRWEEPRKRSRNRERDERNGRHGEGEDKAAKRWYKSDESKEEKRDGK

SEQ ID NO: 169484 - protein, 53 aa, Heterodera glycines; identical to SEQ ID NO: 166121

SEQ ID NO: 169485 - protein, 225 aa, Heterodera glycines
FTFSQKPEKRPKKDDRNENNDTFEHNTQSNSFVGAAISALQLSAKDVDTTFQGIVEQTVFRGSADGNPFAIRECTGSLLVLLGHAATITIDKCSNCVIICGPCRGSIFMRNCANCLLLAACHQFRLQNSRDIEAHLHCSTNPTIEDSDLIVAPLLMRYDGFKEDMESARLDNAPNLWDKVQNFTAETGQFQRMNFDPFANGAISSEVVSDELLEKLSTVMEEPEA

SEQ ID NO: 169486 - protein, 207 aa, Heterodera glycines
ENKDGSFLNKRDISDPYCEIQVGSQVFHTRVINNNLNPVFNECFEAVVDQASGQKLRIELFDKDTAGADEELGRLSIPLESVRQAGEMERWHHLEGCKHGELRLKVCWMDLSTESTGVGRDEWEQEWLGADKPMHPALLMVFIDSVANLPYPKSNLEPSPFVEVSLGRITQRTPVKPKTVNPLFQSKFNFFVKQPEGQELKIRAVDE

SEQ ID NO: 169487 - protein, 307 aa, Heterodera glycines
  unsure (1)..(307): unsure at all Xaa locations
MKSNSKTADIGDFYEILGVPRNASEQEIKNAYRKLALTYHPDRNPGNEQAQEQFKKVSIAYSVLSDPNKRRQYDVSGPSMAMNDFEGLDISELGGVGRFFGAMFTKLGIPIPTQIGPKVLAQARDLSRGNXHKRPLEPGLVLSETVNNQEANFYAFQMTPEFQQHGVIIRCKSLAMSKFKLVLFDQEGAVRHIRESQKKKKYTSAELFFVPFQRINISEFIPIRFYMEDKDTPLPFHFLDTLETHGANVMELQPGKHILCVYGDNFLRMVSYEITFLPLNHYASAAINKINALEPVLASKKSEMQEF

SEQ ID NO: 169488 - protein, 83 aa, Heterodera glycines
MAKRKSKRKAPTKAKSIVALETQFNCPFCNHENVCEVKMDRERNVGFIQCRVCMEDFQSNITALSEPIDVYSDWIDACEAANQ

SEQ ID NO: 169489 - protein, 103 aa, Heterodera glycines
KLELPAVAAAFELVDPPGCFTQNEDYDPDIWHSKEQQRQLMHNAKQSRILKELGCPAMGDGCCSIALLEASVKARVRDVARYQLRRALASNKLFKSRGRNDQQ

SEQ ID NO: 169490 - protein, 89 aa, Heterodera glycines
FLAMGKDTKGDYDPDICHSKEQQRQLMHNAKQSRILKELGCPAVGGGCCSDALLEASVKARVRDVARYQLRRALASNLLFKSRGRNDQL

SEQ ID NO: 169491 - protein, 99 aa, Heterodera glycines; identical to SEQ ID NO: 163168

SEQ ID NO: 169492 - protein, 99 aa, Heterodera glycines
MDESTNHQSREHSILIIIYINKSLIFKKKKKKKKKKNSRGGPVPNSPYSESYYNSLAVVLQRRDWENPGVTQLNRLAAHPPFASWRNSEEARTDRPSQQ

SEQ ID NO: 169493 - protein, 224 aa, Heterodera glycines; identical to SEQ ID NO: 162608

SEQ ID NO: 169494 - protein, 217 aa, Heterodera glycines
MVDAHFAGCAHIKSEYVVLRSETQQQEGGNKPPNESNPLEGNSHEGILPRNVRARGMDRQREQKMAKARAENRQKIVRICPSVLFESEGRKCKYGEKCDAEHSLTKYWAKKPPDIGPSCFLFDQMGKCSFSLSCCFARAHTNESDLSQKSKAGHSEWQSVLNTHTLPIQQQLRKRTYDFSRSERALHESPSGCMEREAPKWDMRTLRGKKYLAPPDD

SEQ ID NO: 169495 - protein, 87 aa, Heterodera glycines
IFSFFYIFILNKKKVHNNSKNPDQQAIPLQLGLHAFPSRKHQPRRHSSLRLGPGTFSPTSLYSPTKGRRRRTKRTDLLWINSNWKTI

SEQ ID NO: 169496 - protein, 300 aa, Heterodera glycines
LFTKIEPAKVAEWKELFGSGKQQQNQPKNNGPTAMSSSSSKKAPNSTEKQQQKQKKKKENMAEERGEVGQIYAEVMAKFEKAKALFVTNESEKLDTEIAALKEQITEQKARLGFTGALFSPPMPKATPAIVVPPAVSSPQTPPKLTAASNASKEQTQQKQQPKQKKPQQQQATAPADDTVDVGCLDLRVGRIIEAQKHPDADALYVEQIDLGEEKPRTVVSGLVRFVPLEQLKNRLVVCLCNLKPAKMRGVESQAMVMCASTPEKVEVLEVSPESVPGDLVVCEPFVRRPPQQLNPKKKI

SEQ ID NO: 169497 - protein, 171 aa, Heterodera glycines
GITNGLHCGDFIFLSDLDVSMNCVLLHAGVGESDLTLPMNLEPEFQISLLRVVGQPGLPTRARFKLPMHCVQHQQQMTIEFVPDGFNQTELEADNTWYLTLQFNRTGTKEQGTFLLANYTLDVRFFNVQNASSHYNGTYLYAKAPSFKPEWSATVQNGQPNIFTCSKNGLH

SEQ ID NO: 169498 - protein, 89 aa, Heterodera glycines
GATDTDLRTFRDFLFQYNAVTEQCFDACIRDFTSRDISEKEERCSKNCMDKFLKAGQRLSMRFQEHQLLNMEAQGAPVMATNTKVQIGK

SEQ ID NO: 169499 - protein, 236 aa, Heterodera glycines
MGEFFFNLDHGYLEALIRGFKSGLLTSTDYSNLVQCETLEDLKLHIQSTDYGNFLANEPGNITVQVIDERLKEKLVTEFTHLRNNSLEPLATFLDYITYSYMIDNIILLITGTLHQRPINELISKCHPLGSFEQMEAIHIASNPAELYNAVLVDTPLAPYFVDCISEQDLDELNVEIIRNTLYKAYIEDFYNLCKKMGGKTAEVMCEILAFEADRRAFIITINSFDTELNKEDRAN

SEQ ID NO: 169500 - protein, 83 aa, Heterodera glycines; identical to SEQ ID NO: 166113

SEQ ID NO: 169501 - protein, 206 aa, Heterodera glycines; identical to SEQ ID NO: 162331

SEQ ID NO: 169502 - protein, 119 aa, Heterodera glycines
FWRLFTSSRALEMLLSKSSKHRRKTRKLRTNFSGASGQEGSVQKKDMTGNSIRKVLIHADQLERLYSAEWPQIICQTLGHLAKIQTFTSVFYLFFEFKNNFKAQHGIWTNWKTLLINSG

SEQ ID NO: 169503 - protein, 112 aa, Heterodera glycines; identical to SEQ ID NO: 139313

SEQ ID NO: 169504 - protein, 87 aa, Heterodera glycines; identical to SEQ ID NO: 166109

SEQ ID NO: 169505 - protein, 106 aa, Heterodera glycines; identical to SEQ ID NO: 166108

SEQ ID NO: 169506 - protein, 133 aa, Heterodera glycines; identical to SEQ ID NO: 166107

SEQ ID NO: 169507 - protein, 158 aa, Heterodera glycines; identical to SEQ ID NO: 162689

SEQ ID NO: 169508 - protein, 79 aa, Heterodera glycines
MDSAAQFDHHQSFGGGTAPTRASTGGGIGTVSLGTVTYICGDCHKENEIRPKDPIRCRECGYRILYKKRSRKMMVYDAR

SEQ ID NO: 169509 - protein, 128 aa, Heterodera glycines
LKTGSKIVEKLIRMSTIPMPPPPTQDEKDQQKKSQWKPLEIGNRMRTTSEDSAESFDAYGPDSPNMTSSGRRMSITERLFGRPVPQERRNSLGEEQMGQEKPKSIAENKDFKELMKRQRKILGDDEWQ

SEQ ID NO: 169510 - protein, 208 aa, Heterodera glycines
IYRYLPPNAQVVLLSATLPHDVLEMTSKFMTDPIRVLVKRDELTLEGIKQFFVAVEREEWKFDTLCDLYDTLTITQAVIFCNTRRKVDWLADKMREANFTVSSMHSDMEQKDRDAIMKSFRAGESRVLIGTDVWARGLDVPQVSLVINYDLPNNRELYIHRIGRSGRYGRKGVAINFVKNDDIRILRDIEQYYSTQIDEMPMNVSELI

SEQ ID NO: 169511 - protein, 154 aa, Heterodera glycines
FAVNLFSAATQILQYYRKNDLKMRTVQTARKSTGGMPPRKQTARKSAGGSGQRLQTARLPAAGGGEPILGTARRSAGGSGQRLQTARRSAGGAAPRPQTARRSAGGSGQRLQTARKAAAGPSLRNDVADEDDDDESVSEEMEESSEDNEPPQLV

SEQ ID NO: 169512 - protein, 196 aa, Heterodera glycines; identical to SEQ ID NO: 163152

SEQ ID NO: 169513 - protein, 169 aa, Heterodera glycines
LVFKPNAQMGRPFLPLAFSLVLLLLAVVISTNCANASPIVGEEQPMAPEQKATKGTNDGQMGDDNRTNRRNNMAAAQHQQQNRNATSLVALGWLGLRSGASSVNAVNVASCYDSRLSSFINDGLRYYSHNMGQLSKYIIDQIKRVRYSGYWFVHAAMIGGQTQGLQWQS

SEQ ID NO: 169514 - protein, 33 aa, Heterodera glycines
FFFFFFFQIASFIANNLRRNWPRDLYERVAQRL

SEQ ID NO: 169515 - protein, 52 aa, Heterodera glycines; identical to SEQ ID NO: 166101
  unsure (1)..(52): unsure at all Xaa locations

SEQ ID NO: 169516 - protein, 83 aa, Heterodera glycines
KPMRTSAYRHTALAGLAAVALITAGCTDDKDVDASMSPQVGLISTSTVQTPPHPAEVKLIGERDVEVTLTGPIAAKYKIKYRI

SEQ ID NO: 169517 - protein, 259 aa, Heterodera glycines
MFLLPGKCRKNWRWNCSKTAIFKDFPKGCEFGMDYRSWIVGPNFLGMKMIPPGIHFIYFSVPGAPRIAFFHNFRQKEVILRRWDTKKEDLVTDEKSDEVELDRLRENLRNIDRFLGVYPFADYRNWLSLSSYITPNSVRRLSPSNSLGRISSQNEMVTQEAKLEKKLGDPFGLSIVDREHRGRIRFTDEGGLPLMSEGEEAKLNFTRISQITLADTNLRRAGIDSSDRLFQCFEAMGGDYREVLAEFQFAFVVFLVGQV

SEQ ID NO: 169518 - protein, 274 aa, Heterodera glycines
MMPKNFCGKTSKFSSCLLPALLLIIVLSILNSVSSSRRHHSPASGHNRRLSSISSPAVANGGSLFEHRTKHQSVAAADESAGGCAVVPPSLWCGCDKLQTQCGTGRLCGRYTGAMRNEPLHITLLYESLCPDCQSFITETLFDVYQKFKTHLRIEFVPFGNAKVLENGTIKCQHGPEECRINKFHSCAIHFMHDPMPFIYCLEKLISSGIPLEKASKKCYVKLHPIPHIYDQITHCFNGPTGDRLQREAGRLTAQIWPDQHEYVPWILENNASL

SEQ ID NO: 169519 - protein, 199 aa, Heterodera glycines
MHTTAAPPPHQPSVVMSAIDDNNSVRFPIIQVEVKIRVPDHLVGRLIGKSGICVKKIMEDTQSHISISESRSQQEVNQYQTPELLDRIITIRGTAFGSVMAAEKQVQQKLRYIQEQDMNISGGGGGVSAASGRQFCPTPVSAPPGGILQSMDGGGGAAIGSYIAPSAVTVTGAPMLSRGPPDNAFHHHPPTAAAMYSAQ

SEQ ID NO: 169520 - protein, 153 aa, Heterodera glycines
MNFNNVNIRKYDNKNERNGAGFGANSDTAAFESWACESFNLFEFLGEDTSPLDEVVPEKMDEDEIEKQKEDAMYSQFQYSDMLIGGQHPTNSHHDFGVNDFANVPSDGRSDFDVPTAFHEGVPFPMPPATHQIYSQNLDAIPHVPSTSKSSMP

SEQ ID NO: 169521 - protein, 96 aa, Heterodera glycines; identical to SEQ ID NO: 162511

SEQ ID NO: 169522 - protein, 103 aa, Heterodera glycines; identical to SEQ ID NO: 163138

SEQ ID NO: 169523 - protein, 130 aa, Heterodera glycines
MLLRMSDVISNGLGNHRPDNAFVFPTIAQHPNEIKPTNAMRSSNPLVGLASSRSSTTACSSLSGKDDDEQQLQKCSIDAATLCRNLIRFAYQLSAAKRRTLEDPELYRMRTHSKTEERLRRKVVRDMIME

SEQ ID NO: 169524 - protein, 135 aa, Heterodera glycines
MTSETVSSDASAAGGADKENTKTDTTTDPSSSENSASIEADHNNSKLRYADETTIIPHDLVERHFLQNTWALWYLKGDRNKNWTDCLKKVSTFDTVEDFWALYNHIQPASGLSWNSDYYLFKEGIKPMWEDKGNL

SEQ ID NO: 169525 - protein, 224 aa, Heterodera glycines
SSGQPGGGGPVVVHGGNAVNFAAAAAHQQQQQQAAGDPSQHVAAVHHHHQQQQQLPPQQNKTLFTPAANPAMVSATPAMQQHLQQQAQTIFHQTSATAVPQFPSYNMPYMYSPVATAQTLQGPNAEIDRFLIQQYGTPYSQLDLQMGAMSIGPPTSLAPNHHRATLESYMENKFGQQQQNVNQAANNGHYQQTQQSQQQQRGLAQSEQATLLGGPPSHVGPPPG

SEQ ID NO: 169526 - protein, 176 aa, Heterodera glycines; identical to SEQ ID NO: 162381

SEQ ID NO: 169527 - protein, 72 aa, Heterodera glycines
PHLLHIRVKDIAKVPVVVLVDQFLRGNELIFVHFELIRFHLHQTVFGIHKFRCSKHFRIKKAFRFILTMGLI

SEQ ID NO: 169528 - protein, 90 aa, Heterodera glycines; identical to SEQ ID NO: 166090

SEQ ID NO: 169529 - protein, 83 aa, Heterodera glycines; identical to SEQ ID NO: 166089

SEQ ID NO: 169530 - protein, 315 aa, Heterodera glycines
HSIQTLSAWLLHHAKKHADCILDCWLKEVRNNSENERLISLINLANDVIQNSRKKVPSFMAAFFEVLQPAFVHASECLDESHRKMVARIVAVWRERQIYSAKNLDDLSKCLTADEPSTFSVSPNLNSETESPSKSSPVDGGQSPVASEEDTKKIKEEFHAFSTLSSNMIALLRKLEDPASTDVKIRQLIAAYPESIANPTLLKQFKSADEFGELSKKIAEAMPVVDVYCGRLREELKDRQNFQFLLEDYIKALNEANERNKQLVVSVKRRIGRLDEEKQELARHIESLPDLTEMFGSEPATTNLSSLGELFTPTS

SEQ ID NO: 169531 - protein, 148 aa, Heterodera glycines
MADEQEETQVAPPQPVLHTENVSSFLDLQTEFIKRRDAAIAGKSQSFATEPMHRRTPRNNILAISKEEKKAKSEVSTLRVYLIRQNEEAIRKEEQQRAKQQQILQQKAAIYERMAKGERLVYDDGKEAEFLVDFHAKKKELEEEARNK

SEQ ID NO: 169532 - protein, 162 aa, Heterodera glycines
FNEVGSRDALFLLSVLQLHLTISVNIATIITPKFMISSDSHRRALGDIAGMGVSGRAHPSLAKMRENLINGTIDFQEVPIIDMNPEDIRAELKRVYTQLRMYKLKNAYQDNPHISKRKGGGAVKKSAAGDATVSGRLSSGAGLSGAGLPKGVRGTEGYCAVK

SEQ ID NO: 169533 - protein, 163 aa, Heterodera glycines
  unsure (1)..(163): unsure at all Xaa locations
MLESDTSGEQLQLLRTIVDSHLTNGQTFFVPWSDKRALQSXFLPFKELANQGVALEFIIDACSKSVALFMALTKNGRETTKKLGVFVDCMEMTYEDAMRFYAKWASGLEEVSADCVQQRLSIFLGRGVRAGAQMRSVVMRCPEILFMGVPXQMDMFWENILDF

SEQ ID NO: 169534 - protein, 142 aa, Heterodera glycines
QFLVKMFGGGGDPFRNPFDQMHQQMRQMDNMMNSMLGDAWDMLNGFGMMGPPFPNHPMLTDGLNRQNQALRRQQPPQHHFGPDTMMSPFGGFGLFGGMMQQMQNMHNHAISDPNSVVFSESTMVSYDGNGQPKVVQHSTRKA

SEQ ID NO: 169535 - protein, 249 aa, Heterodera glycines
ILAGEEKRITWVPLESNPEAFNKYIEKMGVKGVECHELFGFEPDLVSFVPGPHLALIFCYPYQDKANDYQKGIYGQLTASDKGGVPEWAFFMKQKIHNACGTFALFHALTNNTDRIDIGNGVFYDWFKAAKQLNVEQRSDLLANDSELAHLHEHCALRESETDVPRNVAHHFISYFTHGGRLFEFDSGQEFPRDCGPSSEETLLTDAGKICKELMGQLEDISCNAIALCAQNNLIDEMTKKILRYSRVF

SEQ ID NO: 169536 - protein, 76 aa, Heterodera glycines
QIFVKTLTGKTITLEVESSDTIDSVKTKIQDKEGIPPDQQRLIFAGKQLEDGRTLSDYNIQKESTLHLVLRLRGGQ

SEQ ID NO: 169537 - protein, 71 aa, Heterodera glycines; identical to SEQ ID NO: 166082

SEQ ID NO: 169538 - protein, 215 aa, Heterodera glycines
MQSAEETMALVAVTKFRDYLRINTEQPNPDYHKCRDFLFTYATELGFMPWEYECVPGKPMVGMTYAGSDQTLPSLLLYSHTDVVPTFPEHWTYPPYEAFKDIDGNIFGRGAQDMKCVGIQYMEALREILFENGQKPFLRTVHILWGPDEEIGSHDGMEKFVHTDKFRSLNIGFALDERLASETDTYSVFYGERCAWWLQITCPGAPGHGSRFVEN

SEQ ID NO: 169539 - protein, 206 aa, Heterodera glycines
FDLSDQHKAIQDGALKFAKEVVAPKAAEYDKTMAFPWDIIKQAHQLGLMNPTIPEKYGGPGCSNLETALIVEALSYGCSAIQLAIMGPSLALAPLLLAGNETQKQKYAGMLAAEPLIAAYCVTEPGAGSDVSGVKTTAVLKGDKWVLNGSKAWITGGGYAKWFFVLARSDSDPKTPAGKAFTAFVVDGDTPGITRGKKEINMGQRC

SEQ ID NO: 169540 - protein, 147 aa, Heterodera glycines
MPVFALQMSANLVGVTDLRPSDYDDHRWYLKLKCSACGESYPSEQYANTRETHTLTKGKGICHISAKCSFCGRINSLEILIDSYASYSADKNRLFQTLVKFECRGIEPTSFDPRIGWICVGTESGSIFDEIDLNELEWADYDEKNSS

SEQ ID NO: 169541 - protein, 83 aa, Heterodera glycines; identical to SEQ ID NO: 163116

SEQ ID NO: 169542 - protein, 181 aa, Heterodera glycines
RPRVHHRTVLSSLSLLLNINNNNSSSSRRCRRRRTVLLRLLFLVRVPPLPSLRLPLFLRQHLQQFHQQQLNNSNNNHRHQRSRIITVTISPSSRNQPLRSLSLHSCDTLVNVPVKMGMPWCKSLSNSLLFLSNSVHWLLNSLIILWQLRARMCKFGERETQRKSASLIFFCVILFIDYHLN

SEQ ID NO: 169543 - protein, 346 aa, Heterodera glycines
LKVSVVGLERALEQYTSAAHFDAPFDLKQVPLSTEPLTASTDEVKKKAAMVDDASAAMKKQKEEKKSGTSRQEQFALQFASMPEFAACGALFKSCAAVELTETITEYNVSCVKHIFNDDFVLLQFDCRNTLNDQLLEEVFVEIEPQDEGEDCPWHVQSVHPLAQLPFGQPCTTYVLLKMPEDGRIAGTFGAKLKFKICDVDPATGEPESNDLYDEVYTLEPIDVGLADFLLAIAPKGASFTTAWDALKEEGHETEESYALSNVHTLEDAVSKLLKCTALFPCEHSNRVPEGKSSHQLLLCGIFRGGIDVLCRVRLVMDPSDQTVSMNMVVRSMDETVSQMIANIVS

SEQ ID NO: 169544 - protein, 197 aa, Heterodera glycines; identical to SEQ ID NO: 162231

SEQ ID NO: 169545 - protein, 194 aa, Heterodera glycines
  unsure (1)..(194): unsure at all Xaa locations
MSSAERKIDVNRTNYSVVDSEFDSMRERFEKEMRRVDEEMQRLRHEFEGYRPAASRSSPYTTAGTQPIYGGGSSLSNGAGGGAMARHSPTYDPYLENLKSPLIKDESDGKTLRLRFDVAQYRPEEVTVKTVDNRLLVHAKHEEKTPSRTVYREYNQEFMLPRGTNPEQISSTLSTDGVLTVEAPXLPQLAIQNH

SEQ ID NO: 169546 - protein, 140 aa, Heterodera glycines; identical to SEQ ID NO: 166080

SEQ ID NO: 169547 - protein, 142 aa, Heterodera glycines
PFAVSPSFNFLRRPFPLLVFRRSLFKPPLDSPFCGIYRTKMATKNGRIPYELLFELISALPFHIRWAVTRVSKAFDGFVWQKQFSWVRAELIRKEAQRQKEGGAFLQMVDSLSTAVNSLSEASHSLSQASHSLSNSAAQEMH

SEQ ID NO: 169548 - protein, 138 aa, Heterodera glycines; identical to SEQ ID NO: 162468

SEQ ID NO: 169549 - protein, 154 aa, Heterodera glycines
LLKTFDPLQISAKMLHSFRGVRLSSHTNNTFEFSSSFSSSTSTTTKRTKSSNSNEDGRTPTNGKNLSPKKRNHSQQRQQQNDSKKSALSTDLGLKSVVVQRKLNIQTNYSLRAVRKKITASNELVVEQDEGVAKAKPPNEHRYKRAAKDENEND

SEQ ID NO: 169550 - protein, 278 aa, Heterodera glycines
MIFNHFYTQFYILLNVLASTGFVFCTTEWFGDLRAHMNPPKFPPFYDIVYDEPDCPFGLESVAIPEFVYFGEMIATKFVQEHSQCLQFCLETSKCKAVNFFESIEGKNPEVGFCELLVEGQYDNPRLMRPFKKATYHEKIHCRAENEEEKQPFIFDEKDGKQLLIGNESNERKNTSSTAKQTEKGTNENGQKTTAENRQSEGRMNEQRSQKTTEKQPRREEQSEGRGFFCRKTETKEETAQKSETQEKATEPPTAQLNSLILKRLAERIQELKKRFRN

SEQ ID NO: 169551 - protein, 83 aa, Heterodera glycines; identical to SEQ ID NO: 163578

SEQ ID NO: 169552 - protein, 185 aa, Heterodera glycines
MTSSRSRTRRTTTNAASTAAAGRSRSRSTHTGRRSASRRAIGNRATGRSSSVMNASRRVSRRVSSARKSSRRRRRIVARRATPKKRSKSAKKRGRGRPRKPQRGRSARAQRRITITQGVLDVPGHGQMTEAELREIFMAGTTANEPTNRPLGGAEVITTTNANNRTTGGNATSSSSSSPSLSDSV

SEQ ID NO: 169553 - protein, 159 aa, Heterodera glycines
  unsure (1)..(159): unsure at all Xaa locations
FSSYTKKKKCFHLSIFVTLCLLISCLIPFSFDYDDDLFEIGTAQSVAVTGILTCNGRPSGGTKVKLYDVDTFXPDDLMAEGFTDEKEHFLLEGFETEISDIDSKXNIYHNCNXRTYPCLQKFSIEIPDNYITEEKRSPQKIFYIGKLNLEGKFSGQHRD

SEQ ID NO: 169554 - protein, 149 aa, Heterodera glycines
MAANTTQYRGHFVYSLAKLTPSSFGYDDDDLFDIGTAQSVAVTGILTCNGRPSGGTKVKLYDVDTFDPDDLMAEGFTDEKGHFLLEGFEMEISDIDPKLNIYHNCNDEHFPCLQKFSIEVPDNYITEGKRPQKIFDIGKLNLEGKFSGQ

SEQ ID NO: 169555 - protein, 232 aa, Heterodera glycines; identical to SEQ ID NO: 162327

SEQ ID NO: 169556 - protein, 100 aa, Heterodera glycines
NENKNEMGYEIETFWFLFLMFGKALSLSKRIFKSDGLSKFVQNLKAVKFPSKVSTRTHKESKKISSQFVKKKSRLFKQWIFNLVRCPLCDNEQRGGRNAR

SEQ ID NO: 169557 - protein, 160 aa, Heterodera glycines
MDDSHQDNGRKQQNTFLTPKFSILLPTYNEAENLPICLWLIIKYLKGLSYEVIIIDDNSPDGTQEVAKSLQKEFGAGRIKLLTRECKLGLGSAYVFGLKQAQGEFVILMDADLSHHPRHIPEMVTLQEKHGYDIVTGTRYAMGGGVSGWDFRRKMISRGA

SEQ ID NO: 169558 - protein, 167 aa, Heterodera glycines
APQASPHVAFDYGATKLAAAAPSSYGSASEAQPAPAGDENGTKEVSQRKNATPAQTAQHNNAPPQQPARQTTAAQNVLEQRRAKRRCPREAGFVQADAASGGGMHSPAAAARISHRVIGHTAPSTEYASGPRPAGTDAPRVYAAQPYAAPTRSISSVSKSRGSIGPE

SEQ ID NO: 169559 - protein, 223 aa, Heterodera glycines; identical to SEQ ID NO: 163025
  unsure (1)..(223): unsure at all Xaa locations

SEQ ID NO: 169560 - protein, 58 aa, Heterodera glycines
MGTKNGRIPYELLFELISALPFDIRWAVTRVSKAFDGFVWQKQFSWVRAELTRKEAAR

SEQ ID NO: 169561 - protein, 236 aa, Heterodera glycines
  unsure (1)..(236): unsure at all Xaa locations
MSHRKFSAPRHXSMGXFTPKKRAKRHRGKVKAFPKDDPKKPIHLTAFIAYKAGMSHIVRDVDKLGSKVHKKEVVEAVTILETPPMVIVGVVGYIETPRGPRPLKTVFAEHLSEDCKRRFYKNWYKCKKKAFTKYAKKWQDEAGQKSIEADLNKIKKYCSYVRVIAHTQMKLMKHRNKKAHIMEIQINGGTVAEKVDWAREHFEKQGPRGAVCELATPSTASVSQRKGLKGVTSGWH

SEQ ID NO: 169562 - protein, 121 aa, Heterodera glycines
CLFPLSVCLFFSLSFFRPLSLALSFLFLSLSALLAISIESVVLFRWAELGIFGSGTDQSAFVGRAISQGNFAVRHAHQILRLIVQTLAETISERDVAFVATGGGGLIGIVGLVKGREKKKK

SEQ ID NO: 169563 - protein, 158 aa, Heterodera glycines
DGKVERDADGKEVRYPVILSAKEKTIARRVVLAFGQSVCGFDLLRANGCSYVCDVNGFSFVKTSTKYYEDTAKILGNTILRRLASSLSIPWHIPFQDDDPPLVSTPSGKIMELRCVLAVIRHGDRTPKQKMKVAVKDERFWNMFKKYDGPRKRELKLK

SEQ ID NO: 169564 - protein, 91 aa, Heterodera glycines; identical to SEQ ID NO: 165839

SEQ ID NO: 169565 - protein, 153 aa, Heterodera glycines
MSESASDDENAHLIEIKFKTIQETYNVKVNENSTIKQLKKTMAKKLNQPEEKICLIFSGKILKDHENLSQHHIGDGMVLHMVIRNQPSTSTASAATTSSVSTAPTGGAAPNLAGTPPSLGGIGDLFNNPELVQGILNSPFMESMLANPDIIRT

SEQ ID NO: 169566 - protein, 158 aa, Heterodera glycines
SIPKSAFRFGTFEFLKGHAVDERGNLSPFMRLACGLGAGISEAIFAVTPMETVKVKFIHDQTLEKPRFRGFMHGMGVIMKADGPRGFYQGLTATMAKQGSNQAIRFFVMETLKDWYRDGDPNVPVSKPVVGLFGAIAGAASVYVAFAIVTILFFYFRP

SEQ ID NO: 169567 - protein, 76 aa, Heterodera glycines
DDRCKLLVNTLQDTLKGIEAQSYNGGGAGLSRKHRVRDRSRSPIRSSKRHRRSRSRSRSRDYSPMRYSSAVSSRRF

SEQ ID NO: 169568 - protein, 211 aa, Heterodera glycines
  unsure (1)..(211): unsure at all Xaa locations
MTATTIAQDPTPSPRRVFLRDLCSLFCCPPLPSAIVAKLAFMPPEPSYRILTNDSGRTTLELIDGRTEWPHGQDELNNVEVFFTRTQRRNKIACMFVRPFELSHFTLLFSHGNAVDIGQMCNFYLGLGCRLRCNVFSYDYSGYGQSTGRPSEKNLYADIXAALKSLESRYQIPPEQVILYGQSIGTVPSIDLASCNPRIAGLVLHSPLLSG

SEQ ID NO: 169569 - protein, 186 aa, Heterodera glycines
  unsure (1)..(186): unsure at all Xaa locations
MTNVLNSPMLEGIKDSGRHFVSGGIAGMAEVCFAHPFDCMKTRLQIGQFHGILDCARRTLLNEGPSGFYKGLLPPLVIETPKRALKFMAFDRYWRVLRSDALPTWLVIESXSMSGLFTGLTEAVLVCPFEVVKVRLQSELNTPFFQQKSSATVAREIVHSNGWGTEGLYRGIGANLWRHGVWNSCY

SEQ ID NO: 169570 - protein, 190 aa, Heterodera glycines
MEVEVEAVAEAEAEEELDPKGRVQQLLEMGKSLEWEMAVQSDDEQILDLDDDLEMFPRLIFLQLAKFLKNAPDGLNEQQKKELKKVLVNWMEEQKQPFTVDEEMAQVDETVQSLSTFCDQIGKSFKGTPAILDIFLDFHKNETLETEKLEFMWKMVNRKVTHYVKSVGQFYGGIKIAKENLKQVKKIGKW

SEQ ID NO: 169571 - protein, 242 aa, Heterodera glycines
NLFLFYTHAISPMSTNRGRGRVSLPKDHSQTSEYGGRGRGMYSFHQPDVKESSQIAGRGRGTTLQQKTEHGGGYSMGMQQQQEISPMRGPRGGRGHDVSGHGLDRHPVAPTMPSPVPFGGVSAVQPTSGRGQLPSMSRYGAYAAFTKQRDQLDQQKAVLEEVATRLEEHKGEETSVGSQAEEVTSTTLQRGLLQHEVGGMEAQQMVVGEQAQCPSAEGVPHAFLCAGCQFRADCANLLRAIG

SEQ ID NO: 169572 - protein, 268 aa, Heterodera glycines
RKYFFKTYFYFILTIFSSMSTNRGRGRVSLPSGDHSQTSEYGGRGRGMYSFHQQDVKESSAGRGRGTTLQQKTEHGGGYSMGMQQQQEISPMRGPRGGRGHGVSGHGLDRHPVAPTMPSPVPFGGFPAVQPTSGRGQLPSMSRYGAYAAFTKQRDQMDQQKAVLEEVATRLEEHKGDETSVESQAEEVTSTTLQRGLLQHEVGGMEEQQMVVGEQAQCPSAEGVPHAFLCAGCQFRADCANLLRAIGALLKDFGSAASVDGGRNNGTT

SEQ ID NO: 169573 - protein, 215 aa, Heterodera glycines
  unsure (1)..(215): unsure at all Xaa locations
MQETHIVLGIASVCSLLAIIATVVTLPSLYSEMSQMNSKVRDGVEAFRVNTDSAWTDLMDVQVVVTXPPSKPRDNPFNSIFRAKRQLPGHXASAPGLQQPSCPPGPPRPXGRPGQPGQPGGARQPRQPGKPGQPAXPCPAPNIPXAPCPGWAPPAAPEGKGTARATKGAPGKPGNPPLQGGGTWKTLGAPGPQGKTWGNPGNPPKALCNPRKTWE

SEQ ID NO: 169574 - protein, 62 aa, Heterodera glycines
PLINCLLSANCLAFQLFDAPLFFLWRCRSVFFFVSFWPFVTVRFGTHLSIRDCAASPPLTER

SEQ ID NO: 169575 - protein, 174 aa, Heterodera glycines; identical to SEQ ID NO: 162415

SEQ ID NO: 169576 - protein, 29 aa, Heterodera glycines
ENGGPGVAGEIGNMGTCDHCPTPRTAPGY

SEQ ID NO: 169577 - protein, 138 aa, Heterodera glycines
GELGTGPPLEFFIFFFFFFLKSDHLLEGKNRFMHLIIEIWKKGLKWGRKGGIKLKMNVYFFGIHPEFFFFFFFTHSLHSLFTNAQNALIPSAATGTDVERCFGFLPAFVHFLVVPTGHLFIPISRSTSCRIPAARGIH

SEQ ID NO: 169578 - protein, 120 aa, Heterodera glycines
  unsure (1)..(120): unsure at all Xaa locations
NKIRLLHRDKLKPCMWLNKHIQSHYRPLELPWTLCXRSIFQWNNETVNVWSHLLGFVWFVYLQWWALNESLPSVNAPIADYWVMGTAMLCSQLCMLLSSAYHIFGCHSPQRRKQWLRADL

SEQ ID NO: 169579 - protein, 335 aa, Heterodera glycines
KLNLTMKRFNSWASQLENELEGWKDGCPCDFLPNMSPISDANDSSSLSSSSSWSSPLLHKYRLLIEPGNSPFEYVAPGVRAVRRLWNFLILQENLAPIFVRYSFAKAKDKIASSVTKGADLNSILNVIKLVHREHDPIVAFAANSIRPGVMVVSTGRELQELSIDRVLDEHERVVSRLQHYPSTSSFLLAQNWAELDISMQQIRRDPLRDNDDYQLLIPGSDGQPGKNIPTQTSAHLRKRLFSGVRRLEAHSSLPYYASGSSDGSVFLWEWGVEQPVFVARVAGQFAKVAKLAFAQNGARFAAVDGDGLLSIWQAQPGVPAKKPYFIQKCHTKFA

SEQ ID NO: 169580 - protein, 115 aa, Heterodera glycines; identical to SEQ ID NO: 165825

SEQ ID NO: 169581 - protein, 89 aa, Heterodera glycines; identical to SEQ ID NO: 168147
  unsure (1)..(89): unsure at all Xaa locations

SEQ ID NO: 169582 - protein, 141 aa, Heterodera glycines
ALRFFDSMLVLRPPDGEQSVRQLMLLNISCLPINYGTNPRSTHYKRVTRNRLAEKGPDNGDECDTSFWTMMAYRHHFNDQNGTDCEEDAPMLVGAITVSNRNSNCSCCSSNKTDGVVQPQKQMFSVQIQTLACDYNDFSFL

SEQ ID NO: 169583 - protein, 142 aa, Heterodera glycines
MSSLEQLASPHNDFYESLFRQLNPSGSAEVDAASIAAFLKTAHGVSVAQLSQIWEIASELSGYKNRSALNKIGVYICLKLVAGIQHGFPLAPSVLDVPLSAVPQFEFLSFPTPPPLPPVPPPPSADSKSPSVSAELASGGGG

SEQ ID NO: 169584 - protein, 158 aa, Heterodera glycines
  unsure (1)..(158): unsure at all Xaa locations
MQETHIVLGIASVCSLLAIIATVVTLPSLYSEMSQMNSKVRDGVEAFRVNTDSAWTDLMDVQVVVTPPSKPRDNPFNSIFRXQPAPPCPPQNIPCPRCPAGPPGRPGGQGPPGQQGAPGQPGTPAQGGGPGTPGAPGPQGQPGQPGRPGAAGQPGQPG

SEQ ID NO: 169585 - protein, 97 aa, Heterodera glycines
  unsure (1)..(97): unsure at all Xaa locations
MVALSLIANSPVNYPPPPNASLFKILFYPPMQSVPLLAQLLATHFPLQIPSLSFSSCHFHLLFIPFLPFLCFFPLFCYFFCPPFLLPAQVEKINCXS

SEQ ID NO: 169586 - protein, 147 aa, Heterodera glycines; identical to SEQ ID NO: 163746

SEQ ID NO: 169587 - protein, 157 aa, Heterodera glycines
KMPNLLQVLFGPVVYRPYQPNLLESGGNKLFSIGAGAYNTCVVLSPILVPYIAFSWTHSHHFSFLRFVLVFYAIAFSFRTIGRLTNVDYVRFIKLLGTVRKSPQNVTLLDTLKDYDFQVYAAPADFKASPGRTAKWHPPRERLPDLNPPLNFLRQAI

SEQ ID NO: 169588 - protein, 158 aa, Heterodera glycines
  unsure (1)..(158): unsure at all Xaa locations
QHNAKDIWSEVSQLKGMPLLVAGNRTARSAYGSCQECCSGGAQGQPGQPGQPGXPPPCTPCPGGQPGNNGPPGPPGAPGAPCQPGTGGGQPQPGEPGPPGPNGQPGQPGQPGAPGQPGAAGQPGPKGPPGGPGQPGNGGAPGQPGQPGQPGNPGERGI

SEQ ID NO: 169589 - protein, 84 aa, Heterodera glycines; identical to SEQ ID NO: 152292

SEQ ID NO: 169590 - protein, 197 aa, Heterodera glycines
MMNIRSNGKIRFAVSCSSNMNRSMEAHFFLQKRGFNVQSFGSGNYVKLPGPSVDKPNIYEFDSTTYEHILQDLKQKDSKLYTQNGLLNMLDRNRRIKKCPQKFQNYKEKFCVIICLEERVYDQIVDFLQTRESTTGESVHVINFDIQDNHEEATIGALHVVELCKKLEDCEDLDNEIDEALSEFEANNPERNLLHTI

SEQ ID NO: 169591 - protein, 75 aa, Heterodera glycines
NEQIDIKPKIEVRKSHEEKKKKRRHYSSEEEEEGTEEEEKKPEPIDQEQLLVNMREEHNLKFKTGILIGLRADEH

SEQ ID NO: 169592 - protein, 338 aa, Heterodera glycines
VPAPDMGTGEREMACIADTYAPTVGHTDKEASACVTGKPIVAGGIHGRVSTTGRGLWKGLAVFINDEKFMTKLGLTTGFKGNTFIVQRFSNVGLHSHRYLHRDGAICIGVQEYDCAIYNPNGIHPKELEDWKIANGSIRGFPGAKAFEPFTDLIFEKCDILVPAACEKAIHLGNAHRIQAKVIAEAANGPTTPAADAVLMNRGDCLIVPDMFINSGGVTVSYFEWLKNLNHVSFGRLTFKYERDSNYHLLASVQKSLERTFDRAVPVDPSEEFQLRIAGASEKDIVHSGLEYTMNRSAKQIIATTNKYNLGLDLRTAAYANAIEKIYQTYETSGFTFA

SEQ ID NO: 169593 - protein, 182 aa, Heterodera glycines
SSPRWRPLSNSGSPGLQVSGTRPTLGTSQVKSVRKELKMHLLRMLKHPGTFTLHNLHPRMKQLLIELGASQSEIQRAMPAINEIDEALKKRLAAATAVAAGTARQTTTEPKRHRKEPQQHEQEDLDLRDIKRIKLDEDEYDDGIIDLYKQLDNPDSANAATQKAIDITTNFVLERLSIHVVT

SEQ ID NO: 169594 - protein, 80 aa, Heterodera glycines
RFTSLIFKFAIRIINFLVQLDLLLLMRFLRLLLKFNSEGDTGAECEWISIIGSDRRGTEADLTSLPFPIKRPEVLTELSS

SEQ ID NO: 169595 - protein, 170 aa, Heterodera glycines
HGYTAGLLTLPLPALVFLWGTLASPRPSKLFWIVMIIYTEFEIVAKFAFQFGFWPWNGDTVGNNKVYKTEYVFGVQRIQGFAGKDVALLIALFFHRYMLRKFGLWRDASSDRLINEMPKKRMDNGSSSSSSAEKSPQKSTQSTVVPSSSGENFESVAKAQREQNSDDIEK

SEQ ID NO: 169596 - protein, 197 aa, Heterodera glycines
FPLSIEQTIAHPLRVSAAHLQPTKDKMMTRRAFRCSECATMLYRDQLSPNDVKPLLQSFALDHFPEIHISRPVKLGPGQNSAIFLTLTNNSSGPIDISLTGKRLEEEENCVNNSDFSLQLVLSNRGSTDEQPKMAHQQSDSRIINISQHRVGICAECVPSADSIDHYALFSLSFSHTSSDLPEKKLKSDVIVSLKQS

SEQ ID NO: 169597 - protein, 126 aa, Heterodera glycines; identical to SEQ ID NO: 162713

SEQ ID NO: 169598 - protein, 101 aa, Heterodera glycines; identical to SEQ ID NO: 165812

SEQ ID NO: 169599 - protein, 159 aa, Heterodera glycines
  unsure (1)..(159): unsure at all Xaa locations
RHEAQFICLFVFLFSKNYLANSHQLPSFPGQQEPLQGHHQQHAQQQQQQQQVNAGAEHQQQHAQFGGEQVKDEGHIKEHLEGKVDPTAHMTPEQLQFHYFNXHDLDKNGKLDGIELIKAITHFHQENASPGHQGASIPPPLPNENELENMIDSILREDD

SEQ ID NO: 169600 - protein, 139 aa, Heterodera glycines
MRSEVPAPHALGRSRSLADVFRSNSRYAESQFSPTVVPIGMPSKPISVHRPYLTYSAYWPYRYHRNFNTYDNQITDSFYWHYPFRLWTSYKHNWYQYDSPYYYRRYHDNYNIFYNTELMSYGNRSKLMENLYQGTPITQ

SEQ ID NO: 169601 - protein, 145 aa, Heterodera glycines
EIEDMEEFWKQAQQIQTDNHELSERVSSLTREHNTLRTEHERILVDHNTLRTEHERILVDHNTLRTEYERILQRQLDDFHYWILCFAFFIPPLSILATARNNGLSFPVTVLSALAATNFCAFLWIPGILFALAFYFGLRKNAKKE

SEQ ID NO: 169602 - protein, 139 aa, Heterodera glycines
EFWKQTQQIQTDNHELSERVSSLTRENNTLRVDHNTLRVDHNTLRTEHERILVDHNTLRTEYERILQRQLDDFHYWILCFAFFIPPLSILATARNNGLSFPVTVLSALAATIFCAFLWIPGILFALAFYFGLRNNAKKE

SEQ ID NO: 169603 - protein, 156 aa, Heterodera glycines
  unsure (1)..(156): unsure at all Xaa locations
MSDQQQSKIVGTVGAVCALGTVAVLLLLLVQRKKKQRQCNTEEYVRAGHVEQLYIYPMKSCRGNKVDWLDCGERGCAHGXQRDRHFLVVDSARQNQMLTGRIYPKMLLISVHVEQGVLRVDFPNRSSPVEVNLKEVEERNVVLRAKLFSDLQTDGL

SEQ ID NO: 169604 - protein, 114 aa, Heterodera glycines; identical to SEQ ID NO: 163006

SEQ ID NO: 169605 - protein, 172 aa, Heterodera glycines
LSSKVARPKLAGLGARDVLRTEAGLCLFGNEIDERTTPVEAGIAFVIAKRRRQTLGFPGAERIIRQLEKKDFVKKRVGLASTKAGRAARNKMPIANPTDGSSVGFVTSGCPSPTLGKNIGMGYVDKAYAKVGNILTVEAGRDRMIEVEVVKMPFVKSAYYLKPTSVNEDKKK

SEQ ID NO: 169606 - protein, 197 aa, Heterodera glycines
FLDDKEKENGTKNCEAEAKKVELEDERKQKEVEQNNAGKRSIAVPQNQLSVEFLANIEGHRGTTNIVRFSPNGTYIASGDADGFLFVWKLEQEVLECEVQMLEEPATVRQRDADPEMDIPPNKENWARAFRSPIRHDGDVTGISWSPDSQMLASVSMDDSGAVHRAENGKRVWAIRNFRHFANGIAWDPCGKYIITM

SEQ ID NO: 169607 - protein, 148 aa, Heterodera glycines
MEVKLKPYSDPSRWVAIYPLYIDASKSLAQGRRIAKAKAVNNPTCQEIFDVLNHAGLRCELEQKKTHPRAQSRGAANPKQQQQEEGRIRVQLKGDDGENVGEGAAQPKFMTRQQMMEYAAEMVPKLKTRQQQTQVEQNDATGKQKKRK

SEQ ID NO: 169608 - protein, 148 aa, Heterodera glycines
MSLLFVVSMFVDGCAILWSYWDRFKKPKKKIFISADCWLCVFDLLAPSQLGLGISMISHRFDYYVDEHFKTRKWTLKSIRIRRKIGKNGTKQMAIVNYDWKPLPIPKIRMPRKVIGFKSIRILFIDRNAIAFLRHFCQIFAVCPINLS

SEQ ID NO: 169609 - protein, 228 aa, Heterodera glycines
MENCLSNGNDSCRSGSFLLEMKPSTDLASLFVSLPGPVSNEGKAVDEPLGIMRVDNQSLEIAFDVQDIAEQTGCQSADFSSSMFFQKFGAKFVDIMLEPTTLCSPSWADAQQRLIMCKVRAEADCVTFAPKTIGLLEEELAQRCLLREYVERIEHNRTFHVNCRRCGHLIHSHSKGDFVFGVFPNDDWLETAPQMDYFCALSSDCCGAHLEMSSVQPRNSGEGILGFS

SEQ ID NO: 169610 - protein, 250 aa, Heterodera glycines
  unsure (1)..(250): unsure at all Xaa locations
KAGAPRGGGRSPTSGSPGLQEFGTRKRRLLLHWVTESTIEISNVSPFAGTAPSKKFIQGHLANISFRKLKFAGRIGCITMDSEXCEDRAIHLLDNAIFKKNCLSVTKAIDLPKCPKTVSVAQTDEAEKSCKMLVTPLFDIPYEEQLKIKFDHSKKVLELLQKKLTQAHATNSLIAKESLPKNVLPSPLIEQYRNKCEFSVGYSSGDNRSAVVGFMSGKMANRQSNVLAPDECSNLTRNTRSIVRHFEAFV

SEQ ID NO: 169611 - protein, 157 aa, Heterodera glycines
IANCPFLFDRFFYFRRFSSPPKMGEVRFHSDYVSSNRGITKIIQIVLGFVVCSVLCSNWYGGYSCFGEGRLGYVSGLNFVCLMINIILFLLNLFNIRPLKLEQLYNVAAALLLLVGIVLLLWYMIQYSYWNIWMIIAAVCVLIIFLLFQWDFKGNRT

SEQ ID NO: 169612 - protein, 170 aa, Heterodera glycines
WIPRAAGIRHEAATKSPIPGVIRRTFVLPSCKGHKQQQQVSIGDEKDGKTTTLLVPMFSQELASLLAPEQSTDFSIRLQSKSNNCISLRVQVCCTLPSKSENEGQPLEEPAELVQHFPIRCVDPFEPKIAIFCENGGKAQCLVFGQKFRVQLQLKCNGRVAVHNVHWKLN

SEQ ID NO: 169613 - protein, 111 aa, Heterodera glycines; identical to SEQ ID NO: 163001

SEQ ID NO: 169614 - protein, 158 aa, Heterodera glycines
LDSADAENLALINRPDLGVTFTKLHCWRLTQYSKCVFLDADTFVVKNCDELFERPEFSAAPDVGWPDIFNTGVFVFVPSEQTYRNLLDFALVYGSFDGGDQGLLNAYFSTWRESDATHRLPFTYNVTTVAIYGYAAALKRFAPNIKIIHFLGKQKPWA

SEQ ID NO: 169615 - protein, 157 aa, Heterodera glycines
ARRKRIGHFGVRDSRRQSRKRKKFESPQAVPPAANTDFIQTARGAIRRQSLRDRSGMTLARLDSQREGSDLIRSWSKEDVSNEEMSAHHFGNGGPSTSHQPTANQQRRDSPPKRMQKQSQQKQKQMSPDEWFKKLEAESGGLRDEEEEQAEKDVLKG

SEQ ID NO: 169616 - protein, 190 aa, Heterodera glycines
NSILDQFPSFIAAVIKKEEAKKTKMIGMMNNAGMDGPAEFFAGRRDLCELLVPASSLAAVDGQAQPHAPPPKVFEPTQQKKLSYTGSGRRLVDGKPEVNETPEEMWRKAMLRATCTRAVKEMLGEKRRKSSKLRQLISSQSGSIRNFFGTAKNLRHRTTGANQPQQQVEAGGKVISSRTEGPGKPDRMII

SEQ ID NO: 169617 - protein, 311 aa, Heterodera glycines
MLFQRQKLPKICATLFPKCQIRRSSNFVELAGFTASTDSKQYAAKKLLLLKNGSSRSYNDVNVAAGRFAALLNKKYGIQKGDTVLCRTSKNVDALALYLAVLRLGAIYVPLNPTYTKRETEHFVNDAKPKVMVSLNASEDASFTQSGFDVKHVLCEKRLAEEALKQEPSCEVEPAEKDDVACILYTSGTTGRPKGAMVTHGGLVANAETCTDIWHFSENDINLHVLPFYHIHGLFISFNCTLMSKSSCIFLPKFDVDETIAYLPKSTAMMGVPTFYARMVEHAGLNRAAGKNMRVFISGSAQLTPQVVEKF

SEQ ID NO: 169618 - protein, 101 aa, Heterodera glycines
MKAIGEAKIKRQKKQPEAVRRQAIADLLSGCPNEFGQVLKYIDDMKYTDKPDYDWIIATLRSSLSNAGVQEFPYDWETGKRNAAPGAGGGGGGGGGDSYFN

SEQ ID NO: 169619 - protein, 159 aa, Heterodera glycines
NQSPPLAMAPSQMVKSSQSHTDGFCQLLHHQSRPPCASSSSSASSSGYASMVNSIVNPCANRLAGIDEEETAIGGGGSSSRRQSTTIGESGENEGEEKETAVQEDWQAVAEEEQKQQQKGAIGAFASPEGTNCCSSKNPLMRDDFRQLPSSNGLVEALS

SEQ ID NO: 169620 - protein, 126 aa, Heterodera glycines
DHAHEGLPRGPQEEEDGAGQPTSNIPSTSKQQKDKETSGDSKIALPPPKLAIIVEATESAPRGVICPTLPPICCAMTLDWRQCEQHRIGEGGVYVPFPGGEQSTCSDRQNQSVFTNCFGNRRTGKF

SEQ ID NO: 169621 - protein, 208 aa, Heterodera glycines; identical to SEQ ID NO: 163740
  unsure (1)..(208): unsure at all Xaa locations

SEQ ID NO: 169622 - protein, 77 aa, Heterodera glycines
SITLPGREDNDMLIHNLAIHGIAAAEGSACSSGSAIASPVIAALQGEHNQAIRFSFSKYTTHEEIAKTVEVLRHLAL

SEQ ID NO: 169623 - protein, 227 aa, Heterodera glycines; identical to SEQ ID NO: 163990
  unsure (1)..(227): unsure at all Xaa locations

SEQ ID NO: 169624 - protein, 167 aa, Heterodera glycines
MQETQIIVGVASLCSILAILATVVVVPSLYSEINEIATKVHDGVQAFRVDTDSAWTDLMDLQITVTPPSKPRQNPFSSIFRQKRQLPGHCQCAGVQQPNCPPGPPGPAGSPGQPGQPGQPGGPGQPGVPGQQGPPCPVYTPPCQHCPAGPPGQPGSQGPQGRPGAPG

SEQ ID NO: 169625 - protein, 158 aa, Heterodera glycines
KLTRVCSWLGSELNYDPAKIMLYKNVLHGDKPGMWIPHQQLLELQVSQMLNLNTGSYDPRFQRIFKFFYAKLPLPMVDFDNHAHVLLHLMNEKFQLTEMSIFVDKNASVQTLLDEARKEFRFSSMGTKTLRLVQASADGTFRVYQVLKNDILYKDIQL

SEQ ID NO: 169626 - protein, 140 aa, Heterodera glycines
MDFNLKRLAGEASGMFSRAKQLTEEKLLNAEKTELDPHFEQLLAKADKTEEQSKKLLSAMEAYLQPNPALRMGDLFYEKMEITSPAPNRSNTLEYLSEAMQEAAQSFGTETPFGGALQKIAQTEAKLGAAEREMVQTTAG

SEQ ID NO: 169627 - protein, 218 aa, Heterodera glycines
HLPPPPALTGLLTVNKPKVLEKLLEGQVLGPESAVIENGKRKTIPICGRPLGIRRFNSQQFIVADAVLGLLLINFEEETKEVLLPSITVVDKKRLGFPDDLDIVDNDTILFTDLSAKYGYSDCDLAFFEHIRDGRLLEYKVSTGQLRVLMDGLAVANGVQLHPDKNSVLVCETAMARIHRYYFAGPKKGMQQIFVDNLPGFPDNIRISRSADSFYVAL

SEQ ID NO: 169628 - protein, 134 aa, Heterodera glycines
  unsure (1)..(134): unsure at all Xaa locations
ETHIVLGIASVCSLLAIIATVVTLPSLYSEMSQMNSKVRDGVEAFRVNXPXSAWTDLMDVXVVVTPPXEAPGDKPPSNFIFRAQKQLPGTCQCLASTANFPLVARPSAPWNPTAGTQKPETESLQNLPLRPKSP

SEQ ID NO: 169629 - protein, 75 aa, Heterodera glycines
LLDRSVIRFHGLIPSKQRNPFSAESALTSFVQRSASVSNRQSPIQKKRRPIKSCAGVSCPPTQPNGTPKAADNGI

SEQ ID NO: 169630 - protein, 166 aa, Heterodera glycines
NPLVHYEGTAEEIIWACDGKLDAMVVGAGTGGTMTGIANKMRQKLPNCKIIAIDPEGSILANPTNRQKHAYEIEGIGYHFVPYTTDRNLVDEWIKTNDANAFRTARRLISEEGLLCGGSSGANVWAAMEVAKTMGRGKRVVTILPDGIPNYMSKFIDDEWMIVKGF

SEQ ID NO: 169631 - protein, 137 aa, Heterodera glycines
MAPTATSSQEYRQQTYNLPRAIRMVIMGPPGAGKGTQAPAIRSLFGACHLATGDMLRAAVSAGTPLGKEAKKVMDAGGLVSDEIVVGLIRENLDTNPDCRNGFILDGFPRTVTQAEKLDDMLAAKHQALSHAVELKI

SEQ ID NO: 169632 - protein, 268 aa, Heterodera glycines
VWRRTTKLVARVCKEVSGRESVPGKFLKSLETFQYLCNQCAKRWRNSRKKAQLTKKKDDTEKEGAEEHQQATTSKPQADTHAKEESDEATLVRNMVDELAPLWEELSNCLSLLEKAEDSQHAVLCLQNAAEAFFLSYSLVIPQTAQLAPSALPETAPTGGSSPQLASSSAGGNSGEDELGRYQKEMFTFAEKHRSVLNQILRGNTQNLEGSAFAILTHFPKLLDFDVKTKYFHKELKKMDERSRYRHEDVAIRVRRSHLFGDSFRELY

SEQ ID NO: 169633 - protein, 148 aa, Heterodera glycines
MHQGIPNVPTVSNNGTSFGRVAPPGISDTISTTTQFTITATNLPITSFVTTQDPNVRSEFEKADAPEILKIFIPPKPPAVPQEAKKIFEDLCAGGKCLVQKPEFIQQKAAVEKESEQIELKLNPGKSAEQVKREVKVRMAKTQQLKKA

SEQ ID NO: 169634 - protein, 181 aa, Heterodera glycines
MNRRWICGDVWMDILPSFDRPQLGLKMALLSDRFDVLVDKHFDRKSELTIWRRIRIDKDKGPKAKLSVLIDDKCVAFPLPDHSLPIKIRFKELQIDYIGHSVITFLSSNQQIWDRKGTNLDLFIFATDHNNIQSIWDVLAREIWPIFATNIRHLAFRNGDHLDNLRSYTSPTILTDLDQLN

SEQ ID NO: 169635 - protein, 243 aa, Heterodera glycines; identical to SEQ ID NO: 163415

SEQ ID NO: 169636 - protein, 318 aa, Heterodera glycines; identical to SEQ ID NO: 164012

SEQ ID NO: 169637 - protein, 153 aa, Heterodera glycines
MEVDHQSLDSICENILSISRHLDLPLADNLDNAHLSLFKTKLTEFAKESKKQKAIPSLLLPSNLSLNDNEWAKFGQYVDLMNADYAERALLLKRRAEVTIDSFLWSDRVKQIEDKIRQVLEVGGFTNVHFDPVHADDVLAANLDLLYVTKTSD

SEQ ID NO: 169638 - protein, 158 aa, Heterodera glycines
LLLVLCPFARALWPPHSQPHPPPSTMSDEISALVIDNGSGMCKAGFAGDDAPRSVFPSIVGRPRHHNVMAGMGQKDSYVGDEAQSKRGILTLKYPIEHGIVNNWDDMEKIWHHTFYNELRVAPEEHPVLLTEAPLNPKVNREKMTQIMFETFNTPAFY

SEQ ID NO: 169639 - protein, 210 aa, Heterodera glycines; identical to SEQ ID NO: 162600

SEQ ID NO: 169640 - protein, 90 aa, Heterodera glycines
RRSVLRGRHTKTLKRHEQSKCNRRRSGRRTVTPPPRPSPHFPVSLLFLFFVVSPIHPNFVPKKLPFVPSFDEKRSVITIRNCKRSANKKG

SEQ ID NO: 169641 - protein, 104 aa, Heterodera glycines
APTWDPAPPSLHRRPAPRKPLHRQESRAPTWDPAPPSLHRRPAPRKPLHRQESRAPTWEPRPRTSRQRRRSPRIRAPTCEKMQQRPADGWTKPEERATCQKMQR

SEQ ID NO: 169642 - protein, 104 aa, Heterodera glycines
APTWDPAPPSLHRRPAPRKPLHRQESRAPTWDPAPPSLHRRPAPRKPLHRQESRAPTWEPRPRTSHQRRRSPRIRAPTCEKMQQRPADGWTKPEERATCQKMQS

SEQ ID NO: 169643 - protein, 178 aa, Heterodera glycines
  unsure (1)..(178): unsure at all Xaa locations
MTSQNEGAVPAEETKKLVKEKDEATDGFYFQQTMYRIRDPRVSIPFYCNVLGMRLLKQLDFPEGKFSLFFMGYKDLDEIPSDDAAQKKFALSTHSTIELTHNWEHGTDFKGYHNGNSEPRGFGHIGIAVPDVDSACARFEQLGVKFVXKKPNEGRMRGLAFITDPDGYWIEIFNPNNM

SEQ ID NO: 169644 - protein, 249 aa, Heterodera glycines; identical to SEQ ID NO: 162377

SEQ ID NO: 169645 - protein, 161 aa, Heterodera glycines
ANDSRSSSSASSRSRSRSRSRSPRRREQRRRRSRSTFSRSPSPGQKRLHIGNLDESVRRRDIEDVFGKYGRISDCWMASYPPFYAFVVFENNKDASACMKDLGNTAYIKGCRARVTVALPRNGATYRRGPPPPPRRYYDEEDSHRRRRRSRTRSPRRRRSP

SEQ ID NO: 169646 - protein, 175 aa, Heterodera glycines
QSVLYLDGVKFSDIQATIQGIFLAACFLFISRSKPLKTLAKQRPMTNIFNVYTLSTITIQFAVHFACLIHIVRLAHALEERPGKTELEKEFKPNLLNTAVYLMSASLQIATFAVNYRGRPFMESLVENKPLFYSIICSFGAMVAFASNTFPDLNNKFELVHIPVELRDTLICCIL

SEQ ID NO: 169647 - protein, 146 aa, Heterodera glycines
MATVAVHVLLDSRVPAQFHSKFIHSFPFRCICPLFRGNVEGHLCILPNGKPLKRAIRKDFRQFSHEEMALFLEVMGRYKSSGLYTRLGMIHRRSGVHSGPSFLTWHREFLKRLEIIFRSLFPQNTDPSLGLPYWDSSLDGDLPSPE

SEQ ID NO: 169648 - protein, 159 aa, Heterodera glycines
  unsure (1)..(159): unsure at all Xaa locations
DCCPNPYPDICYYFSIKRNPSYYLFTLIMPSALITTITVVGFFTPHSTTGENTEKXMMVSDKLPATSNSVPVLGQYYIGLICIQFTATYVTTWTLGLQXGNSGRTIPRRLRRWLMRVNAHGNFFVRHLLGRELRCTQQSIRNRMSKFDQLLDRADDRPS

SEQ ID NO: 169649 - protein, 151 aa, Heterodera glycines
MKFSLLLAFAFAVPLANAALTFPSIGYVQSAAVNGTLTCNGKPTHAKVKLYDEDDTDMDDLMDEGVTDEEGFFHLSGKESEITPIEPKVNIYHNCNDDESLNPLKKVCYKKISIDLPASYITDGPVAEKVFPLGTLNLAGSFKGETRDCLN

SEQ ID NO: 169650 - protein, 166 aa, Heterodera glycines
SVQWDKVPYFYPIQIIQFGLGQYNLDRKGAEVIVRPLANRATNAMGTENANGTMALGDGATVRVKLFRRLPLLLFSLKTHRMDSEFVLELEKRRREGGTMEMALFFKHSEAKGCVWSDESIKAPRLSAVFNIGPKPTMRWVDFVIDNDIYVTKALKCYVPEKTDSK

SEQ ID NO: 169651 - protein, 284 aa, Heterodera glycines
SPVNSAERLHISLLEYINETFKNEDFYHFLSVQYRSNELIQKWSNKIFYDNKLVTYQLTKNIHLRQIINQQNADLSSGPLSSKQKFLIDGPLVLIDTDKGISDSKWQKVYSLFKLWYPLSFREGQNEHTHSFHNIGEAFCAVLHLHALNLFGGLDLSKIGCITPYSAQAEKIQKLMAMGRDEGPRFEVSSVDAFQGQQREAIVMSLVRNNKMRDIGFLREHRRTNVAITRAKRQFLLIASSRMLNVDRLLRELYGVIRTDGLVVGPDALLPIAHEIWQCHLERK

SEQ ID NO: 169652 - protein, 186 aa, Heterodera glycines
AKHPFSCINEQLYMDMADRLAEDGFREVGYQFVHIDDCWAEKARDSQGRIVADPTRFPSGIRNLSDYMHNRGLKLGIYGDIGTETCENYPGSYQHYDIDAQTFADWKVDYLKLDGCYMNSSMMPDEYPKMGVALNRTGRQIVYSCSWPDYFDHNFEEKINYTAVAYWCNLWRNFDDIARSWASVIK

SEQ ID NO: 169653 - protein, 160 aa, Heterodera glycines
TNIIKRSVFHRINSWLSHLNTACLSTSHQILTKVSALVHANRILHDDNSPNLRKFTRKQIATGQRLSTVSQTEVQHATIVRFDLFILCRETECRRVKVLRLCLHHVRLNTNTVSTKEWVIVLNHPFVALCLNATRQIDGQNLAFSDHLLSEFRRLFVERN

SEQ ID NO: 169654 - protein, 137 aa, Heterodera glycines
MRKFAYFKLCQAVLTSVFLWQILSTHQFCGEFDEPTAFFNSAVSSSHCEQFTLIGMDSTTGEYGAMPDKQKWHMQLMASSGSGQPIDEQQQNHMDEFSSKLPTVGRHCIPIAFSLVKPWVRDNKSHLQKVADLFAIQ

SEQ ID NO: 169655 - protein, 127 aa, Heterodera glycines
MRKFAYFKLCQAVLTSVFLWQILSTHQFCGEFDEPTAFFNSAVSSSSAGGHCDQQFTLIGMDSTTGEYGAVPDKQKWHMQLMASSGGGQGQPIDEQQQQQKNQMEEFSSKLPTVGRHCIPIAFSLVN

SEQ ID NO: 169656 - protein, 134 aa, Heterodera glycines
SKKGIHQQTKQMKNNPKKEKWQSNKKIEILFHLINRIGQNEMKVAYRMCDCSRFAFKVPFFCDRRFSSSSSSSSLLVPLMSETFRTIPSLVPPAFRAHSPTICPSKMRTVCTWSHPQCPSHRHPLSAHNWQMSC

SEQ ID NO: 169657 - protein, 89 aa, Heterodera glycines; identical to SEQ ID NO: 165740

SEQ ID NO: 169658 - protein, 293 aa, Heterodera glycines; identical to SEQ ID NO: 162562

SEQ ID NO: 169659 - protein, 157 aa, Heterodera glycines
EYYLNLAKQLVNANAHILSIKDMAGVLKPEAAKLLITALRDQHPDVPIHVHTHDTSGAGVASMIECARAGADAIDAAIDSMSGMTSQPSMGAIVASLQRTPHSTGLEMDSISRYNAYWETARQFYQPFECTVTMKSGNSDVYNHAIPGGQYTNLQFQ

SEQ ID NO: 169660 - protein, 211 aa, Heterodera glycines
MSDHFWDENVFDLIVELEKEGRHVRLDWLSSNSALVDRFQTDIARLSEEEYSLYAASSSKLQRIAAAECAYKYNRTEELDKLFEKDRDSEALRETNVRHFLINRILDEFRPNIRRLSALPIERTIDAFCLNQPKDIEQHVLDVYDFLMDCPEAPAAAEAAAPSYQGGQESSGTAEQPQEAAAPEAPAAAEAAAPSYQGGQESSGTAEQPQE

SEQ ID NO: 169661 - protein, 193 aa, Heterodera glycines
  unsure (1)..(193): unsure at all Xaa locations
NSVQFSNHTQYPNVKGQRLNERDLAELFDGIRNADLPAKYSHILTGYCGDASFLRQIASIVRECRQHNPKLTYVCDPVMGDNGKYVSRIRHFXKAFMSKYNGIPRELCSIYRDELLPLSDVITPNAFELXDIAIANERDCLRAMEHFHRVKRIRIVVVTSGVPDETTKNKSMMHCYASEAIPSAVDTIRVRYF

SEQ ID NO: 169662 - protein, 126 aa, Heterodera glycines; identical to SEQ ID NO: 162961

SEQ ID NO: 169663 - protein, 183 aa, Heterodera glycines
THSDGEPPRIRCRWPICENTPRTLCNPSVLPYKEYVYHIRQQFERSRERTSAQNAYSDFAAQEAIRRHAFANLRKEITEDSEGPVTRSIRLTSALILRNICHHSVAGRRKLRTHESFISWLSLSHMESARTLAQCLSEMARHANNETEPQRNVIKRKTSCSSGDLQQNQPSFASEQMDDNDTA

SEQ ID NO: 169664 - protein, 76 aa, Heterodera glycines
MVVEADLVTGRNWESTLVDGLSLVGIGDRPDPSADAMVVEADLVTGRNWESTLVDGLSLVGIGGRPDPSASNFLIR

SEQ ID NO: 169665 - protein, 157 aa, Heterodera glycines
PTELQFLDESVADEEAVLGSEITLHQHKMEKEEETTFEEHDDMTAPKSVFGSSSFGCNKREHCKSDDEDYCHSACEEGPTEETKNHSPPEESSKEKEGEQAEDTGTGMTDIVEAEALTEPGTPLRQMDETTNSQRNEEETCPIREEEQQTKTEENST

SEQ ID NO: 169666 - protein, 205 aa, Heterodera glycines
GSCPSAAHCQQKRRRKGKMRTKMHVVVLGPKKVGKTSLLKSLINQHDPKPSTSSSDGQLYVPTVEDTFHVQFGDFRSVDQMPQRSLLILFHDTAGITDFGSIELRKPYLQVADAFLLVYSVLDPLALSQMEALKKYLEREKNGTSKERKEVPIAVVGTNCEMSGKKVNTESALLWASREKVKLFEVSANDRKSVAEIAQHLSERL

SEQ ID NO: 169667 - protein, 128 aa, Heterodera glycines
LTLAILTPSGEGRFGIGRGGEKPTSHERVLLLSLLRFPLALVCRRLPRVVLFPSEPCHHFRALLLNDGFRCARLRLSFGRLIVSPSHGKASSVASAEIANLNAKSNNKQQLIVNMDNTDGTKQKPNYF

SEQ ID NO: 169668 - protein, 207 aa, Heterodera glycines
MDSENALQSFKEFTGCTDDDSARRLLSKCAWNLERAIDFFFSGRREEGDGEVMWDEQQPMTSQGTRRRISHFANSLWTTPAIGGNAANGNRRTDETSHNQFRTARMDDDSVQTLDDSDVQMVEESDRKAAPPPKAVNGSASSDGVRAPIAPVQGVLIEQSFRETYQNRERLWNPVFEQYRQDHQQPSSSSAAASFLSRRANGANNRI

SEQ ID NO: 169669 - protein, 153 aa, Heterodera glycines
YIIGDSELELARAFRTPCPLCLITISVPASLYAVFRDEAKSNSRNFVSHTTPPAQLRSCSIFDDAQMFVPIHLTDGRVISLPIDSQSTPFELCEMLCQQICLKDAFGFGLFLAVGRRFIRSLGVGSECVIDAIASLETKSEKNWRIFFKKELF

SEQ ID NO: 169670 - protein, 261 aa, Heterodera glycines
MSSSHRETGRSPRSVLMRQYEMLLQNSNDNSGFRAWFDNNNLFKWRILIDGPPGTPYAGCKLTALLHFPASYSNDPPTMTFLTDILHPNIDQSGKVCISILHAPGIDPLGHEQPSERWNPNRSVESILVSIQVLLAEPNFNSPANVDAAILFRNDPAQYRKEVRRRVEMEIARTAPILPGAQPPPEEQGTQPPEEQGTTQAAEEQRAQPPEEQGTQPPEQQGTTQPLEQQVTTQAVEEQGTQQPATPPPEGPQQQTDEWYM

SEQ ID NO: 169671 - protein, 148 aa, Heterodera glycines
MSSGGYNNQSNYPGGAHPQQYGTGNTGNAGGYPPAAPPSAGAYPPQQYGGIAPPYGTAGYPPQYQPTPYPTSTGGYAPSSGASIGFNIDAPSAGGGGYPPYQPNLGGGGAPVPSPYPQQTAPYQQPPYHTTGGGAGAYPTQTFGSQPQ

SEQ ID NO: 169672 - protein, 144 aa, Heterodera glycines
KFEFSEKMFYERALTEWRDKILKDSGNKNHAFVLRKALCNLKLFSLDVNGFSDLRKIRGIGVDIATRLSSAWKFTCATHFCTESPTIGQIKSLKSGEAFVLIEQSSTENGGRVPLVAGAKQRKAIPSQIGQQQKSQTNGKQKGH

SEQ ID NO: 169673 - protein, 206 aa, Heterodera glycines
MDFEARIKAYRFVAYSTVSFSIISLLSVCFTLPMLQNYVSNVAQNMDRELSACQGSAKDIWSEVNQLKSIPVVGGNRTARQADGYGGGGGAVSGGGGGGGSCSECCSGGGPGPAGPPGPPGNPGNPGAPGSPGQPGKSVSAPCEQATPPPCKPCPGGQPGQPGPPGPPGQPGSPGQPGSGGGNPEPGPPGPPGPPGNPGGPGQPGG

SEQ ID NO: 169674 - protein, 160 aa, Heterodera glycines
MSNQSTSSAAAAAGSTAPPSPSNEASSPSAAQASSQSSSAAGDSSASPNGPRLKPRKVPVNRFRDVRPALQLRLSQLKHPLIRKLEQDTGIDRERLFYMAMAYFVFLLLFTQCKLLLSTLIGSVYPAYQSIVTVHTQAKSEEIQWLTYWCLFSLFSLCDI

SEQ ID NO: 169675 - protein, 149 aa, Heterodera glycines
MIPLFPLRGPFSSFPRTFHSKSPLHQTKTSLLVGPAVRLLLGHYDIKTSVLRASGPKKNILKSDVLSHINDKKLSPIKAFSAKPPSKMSLENEVISASSHPIIPLKSSGRSEPTHRHVHVDIQLSEMRQNQTKQFVQSRNSIPHAYASA

SEQ ID NO: 169676 - protein, 103 aa, Heterodera glycines
VTLEGRTRLPQRVQELVIDIGNAMTSIQQTSGSTDLLITSIRNFTSSDGIMANSEQNLVKIQNQMDRIETQTNGAEQNLKNVSSVNNFLDALEQSAYCTNFDD

SEQ ID NO: 169677 - protein, 212 aa, Heterodera glycines
MNAFRLIADLSHLFAILILLWKIWKTRSCAGLSGKSQVLFALVFTCRYLDILHFISIYNTLMKVLFIGSLFATCYFMFVKFRATYNKDEDTFRVELLVLPCIVLALFVNADFTALEVLWTFSIYLEAVAILPQLFMLQKRGEAETITAHYLFLLGIYRALYIFNWVYRYYTEAFYDPIVIVSGIVQTVLYADFFYLYVTRVVKDGAKLELPI

SEQ ID NO: 169678 - protein, 151 aa, Heterodera glycines
FYFIKVANKMALAKLKTSVFAIFVVLFVSIDKCRCTNILFTFFHDTGSHFQSVFPLMQKLASRGNNVSVLDTVYEQDHSLEIHHFRALLPKHHNDETSKRHFANDIWSRRLSATDLALYFGTCDKELGILMQNHSQKIVQLFDTNWDVIVL

SEQ ID NO: 169679 - protein, 103 aa, Heterodera glycines
LSLSNSSFDKVKDQMGKMNSKLIKMESEVRKWKNQAEDNARRVSALSDEKVEIERNLSLKDRQLVQLQELCRVLKREGDKPNRQNENGEVTERDGELEAGAID

SEQ ID NO: 169680 - protein, 222 aa, Heterodera glycines
  unsure (1)..(222): unsure at all Xaa locations
MADFEGRVKAYRFVAYTTVSFSIISLLSVCLTLPMLKSYVSNVGMKMDSELSSCQHNAKDIWSEVSQLKGMPLLVAGNRTARSAYGSCQECCSGGAQGQPGQPGQPGRPGNPGAPGSPGQPGQTPQTPCEQVXPASPPPTEPAPAGPPGEAGAPGQPGQPGAPGQPGAAGQPGPKGPPGGPGQPGNGGAPGQPGQPGQPGNPRIATECVPYTVHGTEDGSLR

SEQ ID NO: 169681 - protein, 155 aa, Heterodera glycines
MPSARVSSADSSAVSVSNKGISLGLSSSGTSPSNVIVSSVPVNSGTFRGLSPIGNVSSLVRDVFGPLAAVRRQSPTVQVAAGAGGGIIAGYVFGKTSKMVAILLGSTVLFLQFAQCKGYLQIQNGKLREDFEAARDKLGEMIDGMGAIGGEAVVG

SEQ ID NO: 169682 - protein, 158 aa, Heterodera glycines
SVSPPPPPSSNECPPPLVPCQYEYLDHTADVQLHAWGQSLGEALEQLTIALYGYMTIEIDRVEPIYTMDFSASGHDLSALVYNLLDNCLYSFCAEPFFIGRFAKFLNLKKPSGNTGEELSVQIRIWGESFDPQKHPQGTEIKAITYSNMQIIRKEEEE

SEQ ID NO: 169683 - protein, 166 aa, Heterodera glycines
QMALSSRRGFFLLAGIFAFSSVLQMLVFRHFYIEHIFNLISPILLLCGSVPIIVGEMRGQRTSKMYRPFLITTAISFAITAFPELVGKVLRFIRAGFDTHYFLDLWPYTLALISIWLYPIVYRAYKFVQQNEEHKNGGPYGQNAKVINQQYAKVVPMPLPNAEMIG

SEQ ID NO: 169684 - protein, 152 aa, Heterodera glycines
MFKFAKPMTTTAARMIARKSRLEVMPMAKKYTESGYQRELTYRRSDYSFPAFCESDVTHFKRGEVHHKLMQGGASEGGFTLTAYVLVALLENHVQNKVTELARSYLVSHLADFKEDPYALTLCTYVLHLANSPEKGDVLKMLEGLQTTGTTD

SEQ ID NO: 169685 - protein, 115 aa, Heterodera glycines
MIGSTARCVALLLLGATMAQAFLTTFNVAPNAFRNRRGCGGGGGGGCGGAPPSVGGPVQLTLGCGGAPQPQQAPPPSGGCGGGGCGGGGCGAPPPNGGGAIKLTLGCERPPPQAP

SEQ ID NO: 169686 - protein, 139 aa, Heterodera glycines
MKPLKIDVDFPSNSHPTSQELNQDCIPLYEMLEFEELQFPNYYLSEQLGRGAHATVMPCHFHGKPAAAKLFNANVDFKTIQKEAKLLHEFRHENIIELYALFHGTMSGLVLELMEGGSLSECESNFGISKRTDKSLCQQ

SEQ ID NO: 169687 - protein, 180 aa, Heterodera glycines
QPISAFDLTHFGQDSDIFLGVFIDCVRFRFAESAVPFAKQSGDCGQSPEEEIPRKMFTIERTVHQFIVKGASEKVVDIRNNANGIFMPRGVGERIKQMGQRIGKGFDIDGIAKANPGKDVQISKKTHQTIPGKQQRVDFGFVQTGVIGKLKREKCLENTVAVPTDVNGPPNYSQFRRSPT

SEQ ID NO: 169688 - protein, 213 aa, Heterodera glycines
EEQSHQLALPRLFKALLSFEFANYSRLNESEVDPLLLSWDVLMRFFGDLDVLSRVRFCDAIDVKTLSNALAHLFNSLSDPPGHKDAICVVSNVDELFAGPFHYKLVDRPFDREHFTSNLFFRTLATIPALFREWHGTLSKTEANTVNEYTQKYLSHLLIQRELRSLENMKRGRLEVRILSKVREIECTYRLEETTMTLTILLPENYPIKAPEV

SEQ ID NO: 169689 - protein, 151 aa, Heterodera glycines
MLSVWLDLAPKCAIAEAIASGTGTTVGGTARTSASKRGGKAAAAAAAPAGVATQPHDPNREMRDAFKRLDRAYFFSSYSQMISRITHSDAATYALLKEMLSELIVHFPHRCLWLSQSIVRSTRVAVRSKRCLEIFELAKKKARSNNDNNAA

SEQ ID NO: 169690 - protein, 135 aa, Heterodera glycines
NTVTILRKHQAPQRVLKSDAAVNAAKKRGDDVETTKKYFAGVNRQHKTDKNTAVLDAETEQLHHERVSLKLGTVIQQARQAKEWTQKELATRANEKVEVIREYENGKAVPNQSILTKMERCLGVKLRGKELGQPL

SEQ ID NO: 169691 - protein, 84 aa, Heterodera glycines
ASPCFLPFANFLPSDSEFGEDTSFGMRPVLPGSGQEFALALGGNRPREQFTSFNWGLLSFAVLLSLPFYSNHSRLQSRTSVVGQ

SEQ ID NO: 169692 - protein, 95 aa, Heterodera glycines
MAEDEVDDLLEEAFKNVDEAEKNGTKMDDVIKKKAKEVGIKMNDSEGKRKRSRSGSRERKRRRSRSREKKKRDSSRERRRRSPSENSKRKRRSRS

SEQ ID NO: 169693 - protein, 289 aa, Heterodera glycines
MPRWRTMEGLDMKWQFRSVTSSRKGTQWKVRWERKRRKKRRDKTTAQCDRLPTKLGELSLDEDKTANTDAVVEPPMATEEKAADVGNDKPSGENLNEENNESKGYQSPVSEEEHPIQHVDAKQPTVDEGQTHAAAADSLPPSEPTTDSSAENDGNNEIVSPTALEPQLVPTSDEEEQKPKNAVEAGDDGAAKDNTLSSGGATASDETAAVAAFSAGTPPPVPAVGQQPQQQTEHQLSQHQQQAELCGAKTAVAAESTARDSAEDETDASSSARQSVPAKGGTDGKAHGG

SEQ ID NO: 169694 - protein, 82 aa, Heterodera glycines; identical to SEQ ID NO: 165678

SEQ ID NO: 169695 - protein, 237 aa, Heterodera glycines
SKHLRNFPFGCPFAARPLRRYSAHGLQVHRDNERNNPNTPFQFTEANLAKITVLLNNFPEGHKGAALIPVLDLAQRQHGWLPISAMHEVARVLEMPRMRVYEVATFYTMFNRDPVGKYFLQVCGTTPCMLRGAEAIIEAIEKKLGIKKGGTTADGLFSLQEVECLGACVNAPMVQINDDYYEDLTPRDIEEIIDEFKAGKRPLPGPRSGRLAAEPLAKQTTLTETPPGPGFGLQQGL

SEQ ID NO: 169696 - protein, 157 aa, Heterodera glycines
MTNNLDETNPLVEQALNVIKILHELSRSISNFDQIIGVEVTFPTLPEESFHSTKLSQKLCQELTDPLVVSAKALPNWCNYLVHNFPCLFSMDIRTSFMNTTAFGTSRAIAYLQSRRDHLLDQNRSATSSAASNMAGLRREDHYPEYRIGRVKHERIK

SEQ ID NO: 169697 - protein, 147 aa, Heterodera glycines
  unsure (1)..(147): unsure at all Xaa locations
MLARMKKLLSSGDHADVNFLIGNEDSKEILLAHKAILSVASDVFAAMFRXDATNATRATVGKPFLRPVEITDVEPSAFKVLLNFIYWDDLSERNGDNAIALLYAAKKYKIPELVKACVEFPVSELRDIFSALVRTRILEEEEFAARC

SEQ ID NO: 169698 - protein, 139 aa, Heterodera glycines
DTLRDNDDYQLLIPGSDGQPGKNIPTQTSAHLRKRLFSGVRRLEAHSSLPYYASGSSDGSVFLWEWGVEQPVFVARVAGQFAKVAKLAFAQNGARFAAVDGDGLLSIWQAQPGVPAKKPYFIQKCHTKFASDVKFLGQT

SEQ ID NO: 169699 - protein, 314 aa, Heterodera glycines; identical to SEQ ID NO: 162930

SEQ ID NO: 169700 - protein, 200 aa, Heterodera glycines
  unsure (1)..(200): unsure at all Xaa locations
MDSPPTSTSKLMQIPLLSAKRRKEVLNFQWPFPKHPGLLYRLGSNAVILAVFSLAKLVFCFNKILVQPEQKKLVLDLLNDRNRPLVTISNHRCVVDDPLIWSMFTFREFLSNISRFRYILTAHDICFTKKSHIFFFSLGRCVPVVRGAGVFQEGVDHCVDMLNSNGWVHVFPEGRVTXESVRIKWGIGPINFRNRTNPPI

SEQ ID NO: 169701 - protein, 148 aa, Heterodera glycines; identical to SEQ ID NO: 163808

SEQ ID NO: 169702 - protein, 155 aa, Heterodera glycines
  unsure (1)..(155): unsure at all Xaa locations
KLLITALRDQHPDVPIHVHTHDTSGAGVASMIECARAGADPIDAAIDSMNGMTSQPSMGAIWGFVGTGTGLSPGWENDPVFPNTTLYWGTGPYIFPNPSKCPRNNKKGGNSECEKNTXPRGGKFKKFHFPGFFLGGGEKNFQGGKKIIPAGNFSL

SEQ ID NO: 169703 - protein, 96 aa, Heterodera glycines
LISGEQSPRWTREDLLRYSEPKLGYTRDSVGFLNFVEVLMGFNSAERKAFLQFTTGCSSLPPGGLANLHPRLTVVRKVGSGDGSYPSVNTCVHYLK

SEQ ID NO: 169704 - protein, 162 aa, Heterodera glycines; identical to SEQ ID NO: 164033

SEQ ID NO: 169705 - protein, 163 aa, Heterodera glycines
MLSPFSYDPFYRRSLWPMATHVGNVLSPFRQLERELDHFFEGMQPMLRDHVAQLNVTDKGDLTYKVDVSGFRPEEINVEVIGNEIIVNGEHREQNDSESVHRQFSRRVLIPEGIQKESIKCELDGGRLFISGMKTADKGGRTIPIEMKKKAAVDQQKEEEKQQ

SEQ ID NO: 169706 - protein, 205 aa, Heterodera glycines
  unsure (1)..(205): unsure at all Xaa locations
MVKTLWIVRHAEREDNINSNWQKNANPQKLKSDNSPLSSRGIKQATELAERFSNVQIDHIFASPFERTVQTATFLISQRKIPIKVEPGLAEALYLCESPPGFEESAELRRRFPLVDSEYRSIYEKPMPREGFGDESCIXRIRQTLEEILRRYNEATSIVFVSHGSPIGRFSFKKSFFKPVKNPQIFKFFSWSCLTDATIFQIFKI

SEQ ID NO: 169707 - protein, 229 aa, Heterodera glycines
MSSHTETMKSSSNGSDWPFCSDRMKMMQKPAKLNLNEAGPAPPSPCSVKTPLEGVSTEDTLQRLRPKEDQAEQSPTGTLATRTPKDFFFIKVLGEGSFSTVYFAKEVTTGDEYAIKVLLKSEIRREAKVRYVLREKDIMAALTYVHGGHPFVIRLYCTFQDNDRLYFALAYAKHGELLDWLRRLGSFDEAGTLFYASETFCALEFLHRCKGIHRDLKPEDILVGADWHI

SEQ ID NO: 169708 - protein, 238 aa, Heterodera glycines
MLHGWRVFASCSKSVLKSPSLQSGGYGLSRRLKSDEVRGPVIGIDLGTTNSCVAVMEGKQAKVIENAEGSRTTPSIVAFTKDNERLVGAPARRQAVTNSENTLYATKRLIGRRFDDPEVQKDIKVVPYKIVKASNGDAWLEAQGKLYSPSQIGAFVLMKMKETAESFLGTSVANSVVTVPAYFNDSQRQATKDAGKIAGLHVLRVINEPTAAALAYGLDKGEDKVIVVYDLRGGTFDI

SEQ ID NO: 169709 - protein, 254 aa, Heterodera glycines
SCPFIPAFPIKMSQFGPAFAVNANNPYAHFKCCCATFNIKDHAQFCGVLSFALFLCLVLISMMLFGSLSLFYIFVGVVVYILLMKTLFGVVNKLSLLFYIFFEAIQIGFYLALMLYIIVPLLFLEIPRRNCRNVEINSEICDEPRNRSEDYVELLLFVSLLASIKLHFARVFAHFYRYLTWNEQCSVHRAQYINGRGIHITMDQPQFAASFSPYYGWDTHTVKGCDRRGRQNETNNPNQLPITELPPTYAQVIG

SEQ ID NO: 169710 - protein, 183 aa, Heterodera glycines; identical to SEQ ID NO: 165655

SEQ ID NO: 169711 - protein, 93 aa, Heterodera glycines; identical to SEQ ID NO: 165651

SEQ ID NO: 169712 - protein, 135 aa, Heterodera glycines
MLVSAPLIQQQQQQQVFQQQRPSTSASSADAVLLPHATEASAPTPYQQQQTEDQLELPTSVPSAADSQRQHRATQQPQRFFKSGLGIRIIDNDLPEGPGRRLRKNVANVRKHIDYIANALNHMEARLWQSPHRRQ

SEQ ID NO: 169713 - protein, 113 aa, Heterodera glycines; identical to SEQ ID NO: 162707

SEQ ID NO: 169714 - protein, 127 aa, Heterodera glycines
MAPLCFQVNEYYAQISELVPGLYICGVTGLTPANMKAFRIELIVNATREVPNLKSLGHIQRMKLWVEDTTDEDLFPHFDIVADQIHAVIQDRGAVLVHCVAGVSRSAAICLAYLLKYRTRSLRAAYH

SEQ ID NO: 169715 - protein, 75 aa, Heterodera glycines; identical to SEQ ID NO: 162913

SEQ ID NO: 169716 - protein, 93 aa, Heterodera glycines; identical to SEQ ID NO: 165645

SEQ ID NO: 169717 - protein, 130 aa, Heterodera glycines
AMMAAAAAAGAGGRMPATSTAASIGAIPTPPAGIVPPPPLPAGIPSPASGGAIPMPPQAAFAAYQDKSISGGKYGTRDEPSTSAASSSTMVKTLGAKTRIVCQDEQTSLEEMMAQRIVPTYTRGLMPFVR

SEQ ID NO: 169718 - protein, 213 aa, Heterodera glycines
PVLGPFGEHPAAAGDNDGASAPGPSPADPTHCPAAVRRPSDDALPAAPLPPVAAALLPRPFCRRFDFCCRCFFPFRSPAADAPAAICWAQRCHPSSAAQPQHRQQLHTVQPPSAAYAHSRPAVPRPNGCRLNGTNVLNGQAPSVSSCCFLSLPPPQLQAVQPPTVVDHKQTSQPHLQQSVAQFGSTIGYPHHHHVTAHQPPLSTPPPPLMLMA

SEQ ID NO: 169719 - protein, 157 aa, Heterodera glycines
QRLLPSPAAAFVPSPNGTVSVPSLPSSPTTRTTTTAMISVPAIATVTATSLASSRVPSSSSPSPVAIHPTISTKAATSSAPIILLPNKRSKEGHQSQKQTMAKEMATDFAAESKGGRESEIRRAPARQNAEDEWTKANELDEKGIPPTQRTAPKLST

SEQ ID NO: 169720 - protein, 89 aa, Heterodera glycines
MLFLFSFLSQMRIPSVCPFFYSFSVSITTAAAHWSHRPHLTHLRHFSLKQFFCVRSAEKDKRKGQNEQNNEKKMKQMGRHCQINWNNRN

SEQ ID NO: 169721 - protein, 150 aa, Heterodera glycines
HPTKGCRCRCPKRETPSRRSKCHSSPKGSKSNGRCIRRANERTLRRNAPFSFDKQSFAHKRRNTFSNRPFLSTLELLASRQTIDKPSCTSNSNLALEVSKAGIADLNRPLSRMDIFYSGSTVTLTSRIRRREATITSTNAEAGGELTASA

SEQ ID NO: 169722 - protein, 145 aa, Heterodera glycines; identical to SEQ ID NO: 162906

SEQ ID NO: 169723 - protein, 138 aa, Heterodera glycines
GYLNQLWDTVYMDLPTREFRVEEACEFMFNLLQVIRKSEEKVVRNIVSDLEIRREAVTNLWNFLGLPSFDESLFPPKSIALLKVLDSEKNRLEAKREEIVGSQARLTGKYKALCDRVGTTARQIEGVHDRIMSEDELD

SEQ ID NO: 169724 - protein, 115 aa, Heterodera glycines; identical to SEQ ID NO: 165629

SEQ ID NO: 169725 - protein, 145 aa, Heterodera glycines
MSSFPKAVNIKIEHNNSFSDHDYCYKESAVEEMDEENRSFFVDVENDDEYDDEYNARGRKRRSVKQPDFFMINNKANNSNKKTSKARPRKSESKRGKSGEKKVKYEVEYIWGKRTDKLRPDKVEYRVYWKGYPIEKSTWEPEDNL

SEQ ID NO: 169726 - protein, 150 aa, Heterodera glycines
PSAAHCQQKRRRKGKMRTKMHVVVLGPKKVGKTSLLKSLINQHDPKPSTSSSDGQLYVPTVEDTFHVQFGDFRSVDQMPQRSLLILFHDTAGITDFGSIELRKPYLQVADAFLLVYSVLDPLALSQMEALKKYLEREKNGTSKERKEVAL

SEQ ID NO: 169727 - protein, 157 aa, Heterodera glycines
VFQTVLEALEYPQIKVIAIIAEGVPENQTRKLIKVARQKGVTVIGPATVGGIKPGCFKIGNTGGMMDNILASKLYRSGSVAYVSRSGGMSNELNNIISHNTDGVFEGVAIGGDRYPGSTYTDHILRYQDDPRVKMMVLLGEVGGEEEYKIVQALKEK

SEQ ID NO: 169728 - protein, 103 aa, Heterodera glycines
SFIHSRTPPNFAPPPPSLLIYINNAVRFVHSSSVHSSPPPPPTRPHFGLALLALLSGFCLGNTFFCYTLITFIRMKTPPPPSEFLFFVIAAMPNCKTSATNKE

SEQ ID NO: 169729 - protein, 130 aa, Heterodera glycines
MSSEQALKAKQLGNEAYKRKEFATAHKYYDEAIKYEPTNIVFYSNKAAVFFEEGKYDECIEMCGKAVEVGRENRADYALVAKAYARMANSYKMKDDPKKALHFYEKALSEHRDPDIVKKHKELAKEVKEM

SEQ ID NO: 169730 - protein, 60 aa, Heterodera glycines
RGSGRARGRHSAATATACLTLVTAVVRHLGVGLGAGDLTLVPSSLQPGGSTSCSAAATAG

SEQ ID NO: 169731 - protein, 52 aa, Heterodera glycines
KPATAPPPAKQFPPSPSPPPAQTRPTERPAKRDGRLFTGQRCDGTRGEPIAI

SEQ ID NO: 169732 - protein, 155 aa, Heterodera glycines
YLSRPEKEKSHEEGENDFIRFAATSMQGWRTHQEDAHNCILSFGDECSFFAVYDGHGGSDVSSYLKKNFPDFLKEHNLLLHTIDEGLSAALHKLFVKFDETLRHDDTVKAMVELKTALSTTSDQQQQAEEQKANEGCDPGEKERKERESLIDAKK

SEQ ID NO: 169733 - protein, 130 aa, Heterodera glycines
KRARSARYEATKRPNVLKKRAQSARHEAAKRPNVPKKIKKRARSARPEAAKRPNVPQKIKKRARSARPEAAKRPNVPQKIKKRARSARTEAAKRPNIPQKIKNGREAPVLRPRSGRISPKKLKTGAKRPS

SEQ ID NO: 169734 - protein, 309 aa, Heterodera glycines
SAMAATSKLQKSGRKRLRYDSEESSDDDGIGGDGATVAIIPTPSIDLVLQNLATNALAFTAAPEMEENEEQGDAIQLFCSGSSAAEEEHHHHQQQPNGQTVSSGCSSSSRPSTDKEGEQKLRRMQAQARRQRVSKWKISETAQRKKQMQKSKGNKGVGGGGALVYSVRSSSTTANNNSISKKPPNKKKQNVADRTARKNNIGGAGGEEAPAVTKTAKTLAELLQYSNVVAANLENKLTSPTTSKNDGPPTADGFTFTAAAQEECPSSSSSKSIATLITDRFRPNRGTFYRYTPAPVVTPAVVHKLLLNA

SEQ ID NO: 169735 - protein, 90 aa, Heterodera glycines
  unsure (1)..(90): unsure at all Xaa locations
GGQRGNNGPPGPPGAPGAPGQPGTGGGQPEPGEPGAPGPNGQPGQAGEPGAPGRPGQRENPRPTETAPAGPXGEAGAPGQPGSGWEPRER

SEQ ID NO: 169736 - protein, 264 aa, Heterodera glycines
SRFRAVSKKVGKALFLVAGGPLIEHHISQLCEELENLHEIFIVGLYPAEEFGKFMSDGEKKYRRVPIRYIQENCPLGTAGGLLQYKDILIDRKPPDALFVLNADACGEFPFLEMVQELNQKTEAKCLILTTEATREQSVNYGSVVIDSVGLECSRGRVLHYVDKPATFVSTHISCGVYLLRGNSFDVILEQAEKTASERGLNTDSPTMQLFHSNQLWFEKDIFPQMTSDGTLFAWHTNRWWSQTKTAGAVLYANRHYLGLYRAR

SEQ ID NO: 169737 - protein, 152 aa, Heterodera glycines
THFQFDFAHFAFVWKCADNCWRNARAKNQQNVSTISDHYRMFLAINSDHYRMFLAIIITAISFAITAFPELVGKVLRFIRAGFDTHYFLDLWPYTLALISIWLYPIVYRAYKFVQQNEEHKNGGPYGQNAKVINQQYAKVVPMPLPNAEMIG

SEQ ID NO: 169738 - protein, 99 aa, Heterodera glycines; identical to SEQ ID NO: 165600

SEQ ID NO: 169739 - protein, 153 aa, Heterodera glycines
VLSSVVIGEIQQQQSPDSFVPTSFGRRRHCWVCNDVWMDILPLFDHAQLGLKLALISPRFDVLVDAHFNGKSELTIWRQITIQRFKGPKAKLSEWIDDKWVAFPLPDRPLPNKIRFRNLRIENPDHSVLAFLRANQQIFEKATNLCLSVSSCF

SEQ ID NO: 169740 - protein, 148 aa, Heterodera glycines
MSSTISENQQQSWGSFVKTSFGTRRHCWVCNDVWMDILPLFDHAQLGLKLALISPRFDVLVDAHFNGKSELTIWRQITIQRFKGPKAKLSEWIDDKWVAFPLPDRPLPNKIRFRNLRIENPDHSVLAFLRANQQIFEKATNLCLSVSS

SEQ ID NO: 169741 - protein, 438 aa, Heterodera glycines
LFKSLGKSLHRVNGYISNKSGFVDAWKLAKETLELWTEIQSSTLRNLNDLLKEVARYQEELARMRKRAKDADTLETINLMLTTTTCLQKARDTFNQRSTEVVSLKQSNKEWTAASTKEYLRARNKLNKAHEEYKQYMDKYSQIRDTFEERVNQAARSFQEHDRLHLLQMKSFFTQMAKCLENAHGANAQVSATLRQRVEQNINVEQMMFRFIEEKGTGTEPPQKLQWTNADELPPELDVVSCVQSQSSSSNSSAIVPNFSGNQLQSNANHLLGLNDSWLTVGGGKSIAAGGGESANSGGSFDGGFGESMCSLGVKRGSINGCSEQNKSAGESDSERHLELPFSANPSSSVLSNFSAQNPSSSYVPQQISSWLGRQKFSGRLKKHFSTSQSNLAGPMAIEPFAVGESDQQTKDELIGSASNFSKSCNDPSIKTNSSAGL

SEQ ID NO: 169742 - protein, 138 aa, Heterodera glycines
ITFSVSHYQRSGILSLLPRGTIVQDELFEPVGYSMNGVPAGDEYVTIHVTPEPEFCYASFETNHRRGCLYEQTLRVLDCFRQPGRFILTLFANEHSNGAIEVQQRLWAEDFPGYRRLSVQMLRLQANWGGGEGEKSFN

SEQ ID NO: 169743 - protein, 125 aa, Heterodera glycines; identical to SEQ ID NO: 165596

SEQ ID NO: 169744 - protein, 127 aa, Heterodera glycines
MQCAYRFNVATLNCWLLPHPWPIGSKHKQFRLQKLIDELKNSRFDVIALQEVWSEKIFLQIAHELNGFFPHSHYFHSGFTGSGTCVISKHPIVSTLLHRYSLNGFPHHVHRGDWFGGKIVGMVEIMV

SEQ ID NO: 169745 - protein, 326 aa, Heterodera glycines
MSDSIPRAVELFMEKKRARISKFLYTYNGNLQLNLPQLHAFACSTGGLIDDEFRERIWPILAKNLPQAKRCKDTQWDALRSEEYNDQTNHSSDELQQQQQTLFLSDSDFESALSTFTPSISGCDDQLMDAEDDAEGDDDQRMAPQNATVFDFSPDQLRAHKEWNQVELDVARTLARFPPNIDEDERACLQNELTPLIVRILCENEDFRYYQGFHDVCLTFLLVLGADSALQVMRDICARGAFHNYLCCSLEESAMRELQDLYVLLFLHDQEVEKRLRSAELGTLFALSWPLTWFSHALQNYSQVVLFFHLFLSSHPLMPIYGSGRV

SEQ ID NO: 169746 - protein, 129 aa, Heterodera glycines
MPSLSDSPPNIDPEKGFQLSAGVGHSKHSSTPNGRVRDVDELAEEVPGESDVSDEEDAESPLPSVHAQMGLFCHTNPEVAPASMWTSKNVQEFKDNIKKEGTEGVLKIGHGETVTVRVPTHPEGNSLVW

SEQ ID NO: 169747 - protein, 156 aa, Heterodera glycines
  unsure (1)..(156): unsure at all Xaa locations
SNGSPIHNKNAVLSVGPHGPMLMQDVVYLDEIAHFDRERIPERVVHAKGAGAHGYFEVTSKDMAEHCKAAMFSEIGKRTPLFFRFSHKGGESGSADTARDPRGFAIKFYTEEGNWXLVANNTPIFFIRDPFLFPNFIHSQKRNPATHLKDPEMMWD

SEQ ID NO: 169748 - protein, 153 aa, Heterodera glycines
  unsure (1)..(153): unsure at all Xaa locations
FSEIGKRTPLFIRFSRVRGESGSADTARDPRGFAIKFYTEEGNWXLVANNTPASQXIFFIRDPFLFPNFIHSQKRNPATHLKDPEMMWDFWTLRPESLHQVMFLFSDRGIPDGFRFMNGYGSHTFKLVNKTGEAVYCKFHIKTRQGIKNLSPQ

SEQ ID NO: 169749 - protein, 262 aa, Heterodera glycines
  unsure (1)..(262): unsure at all Xaa locations
MLSEIPLPHQKGIVDPRLPCKIQIVGRANDVAKRFEVNLLSQTGEHLLHFNPRFDEHCVVRSSTKDGQWQAEERGGTNPFVAGQPFSLDLLVEQGLIECSVNGFQFCEFAARDDFSQLXAVSVGGDIQLNSLEVSTAEGPAIAHEGGDKGPREADEENAQEQPPIVMPAHPEPQPVPAEPTPQQPQPPPAQGPLSVPYQAPLHALLQTNRMRVVGVPRPGAQRFTVNFKTHDGETLFHFNARFDQNCVVRNASVNRQYAPEG

SEQ ID NO: 169750 - protein, 302 aa, Heterodera glycines
MDAEKSALNETVPTESTANLTTMEQTVPKVKEVKPRRSLLAQASQQRPPLPRASAQSSASAPTQVALPRSHSRSRITPSARPVLSSRENTSIALKGTAPMSGMTRRSMTTKSQSVEHVAVAQKHLSGIGRNIANGRTKESKSANASDRQRKEVEDELNRTKQMLKQTTKTLDVFAVVASHFDRKLDNANTESAVLMAQKGDEAAQHQRAIAELDCNWKKRLQRAKEDHRVEFDELRAKISSEQAENITKIQLQHQKTVNELEKHVQKLGKKLAEQEEKHRRELGESASQSTNRLHKELESRN

SEQ ID NO: 169751 - protein, 171 aa, Heterodera glycines; identical to SEQ ID NO: 162333

SEQ ID NO: 169752 - protein, 123 aa, Heterodera glycines
  unsure (1)..(123): unsure at all Xaa locations
NGNVSPAQLNVACRPLLVVEGDVHFPLLLLLLHHLQFVVIAARCEIRRVHRNVALTLVDXVRRQYFLLANAQKPSELDTIEGSAKCRADIQNGRFTGTDQSFRYSHWPSVTEGDKFLLLFCPL

SEQ ID NO: 169753 - protein, 62 aa, Heterodera glycines
IAKIFNNKKNGIQFEYCNLINAGYRTNARGAWVGTLSSSTRWLGYCIVVIMVVEGVQLGTNS

SEQ ID NO: 169754 - protein, 147 aa, Heterodera glycines
MSTIGVHEIFKLSQKDHQPPEKRSKLSDGSTQIVPSVATAKNGGDILEALEKSEDTSELNEIDEASVKRICFLLERKQGKNAELRIKYAEEPPKFMESEIELNNAIQEMHVIAAEPQFYDVLVEQGSVQLLLQLLSHENTDIIAAVC

SEQ ID NO: 169755 - protein, 113 aa, Heterodera glycines
MNVQQQQPVTSAYPQQGNFAEEKQLHPNHNVYRKMELLISLMLNVDDGVPIKTVKSFLSKLPRIPSVFTGQDLVGWLLQNVDIADLGDALHLAHLLASHGYVFQIDDHVLTVK

SEQ ID NO: 169756 - protein, 115 aa, Heterodera glycines
MNVQQQQPVTSAYPQQGNFAEEKQLHPNHNVYRKMERLISLMLNVDDGVPIKTVKSFLSKIPSVFTGQDLVGWLLQNVDIADLGDALHLAHLLASHGYVFQIDDHVLTVKNDNTY

SEQ ID NO: 169757 - protein, 219 aa, Heterodera glycines
YICTISLPPGNNRFYLFTNVEPYAEEADGVFWSTHSRDVYNEKPLKEDMITAIEVMGFVLPHPFISPFLFSNFMYLRLFPDKTPRTVENFCTHARRGYYNGHAFHRVIKSFMIQTGDPTGRGTGGQSIWGGDFEDEFHPALRHDKAFRVSMANAGPNTNGSQFFITICPAEWLDGKNTIFGQVVEGFNVVQKINQVPVYKKSGRPREEISIISISLKSV

SEQ ID NO: 169758 - protein, 116 aa, Heterodera glycines
SEMGVLMRTTKSSTLSHGLPLHHHLHHHLITHLNFFYRRPPSLPDQQSSSSDDSHPPRPPRPQRTKKNHQSSLKHGRLNQWQQRRRDLQQQQPVVRDLLAEAAAAPLPESDDDDEQ

SEQ ID NO: 169759 - protein, 135 aa, Heterodera glycines
MSASNSRKAFVPFSNALRRRKLLFGFGVGTVIGAGFYYMDKNNERRFKRDKDVYFVSNAHAATVDTKAALNKRPSGSLPTRAELLKGMRDEEFDILVIGGGATGAGVALDAQTRGLKTALVELDDFSSGTSSRST

SEQ ID NO: 169760 - protein, 180 aa, Heterodera glycines; identical to SEQ ID NO: 163878

SEQ ID NO: 169761 - protein, 36 aa, Heterodera glycines
RKNQILNYILLLIFNGICALVNSLFFIIACKTKFLI

SEQ ID NO: 169762 - protein, 216 aa, Heterodera glycines; identical to SEQ ID NO: 162634

SEQ ID NO: 169763 - protein, 183 aa, Heterodera glycines
GAPRGGGRFPIVDPPGCIPLLRANNANVRPQLQGVDNAKDCLTPSTTGNNQPTREQPKLMDIDERIGMDDEDNDDGDRFGEAAEVLGGGDNANRVGGERVVGNRLRKRRSVSCEPTANSPAKMAPHQPADDQSAGCLLQRTQSVNAFAVPSAHQQNAVVPIASSSRISSRMPSSVSICSYANS

SEQ ID NO: 169764 - protein, 160 aa, Heterodera glycines
LPSASSFSHNHFPSSSSSTSMPKFPVPFLANSLKISSPVCADVTPTEKKATTIREVRTQKQQIKKEEKSEAQIAQEKERERVKREKEREKRRTKLSDAFSALRSSIPTLDYKTPFSDKMDCVKRLLPFGLYSETELSDDFLQKFDGELQRHSEFLCERMD

SEQ ID NO: 169765 - protein, 169 aa, Heterodera glycines
KQRSDSLLLPNDPNSYLAVLNQVTWSDFIERIVPTGTVSNVHLKVSRGPERRISKKALVTVMPGARWPDGKMLPRMFFVNVPDIGRVEQEIRKAEVDAGLAPEHWSNIQWMQPGPMSLIIPSLVIFALFVLPLVFLGRMMTGSKMGNFSESISSMMGHRLRIYDPALKD

SEQ ID NO: 169766 - protein, 182 aa, Heterodera glycines
NQILNMSSLSEEVKKVKQAANIPPPAVCNRFVEGFSSVYVFETRPSSHGGAFAFRYDVEMVQLTRNKSLTSGGGDDGKNGLLRGVCFELIKFVHDSTQGFGQAAQFVYDNRKILFTNKRIEQFVLEIDTEKVQGIVRDFLRGSSVKIEIKPCQTDKHELDLNDVFSSISRRPDEQSDRSLRT

SEQ ID NO: 169767 - protein, 104 aa, Heterodera glycines; identical to SEQ ID NO: 162636

SEQ ID NO: 169768 - protein, 344 aa, Heterodera glycines
  unsure (1)..(344): unsure at all Xaa locations
MCHIETYIFMDFETTGLFDDGHNNPLTNPNRSNETARERAQRLDNLIKSDGNRFPKITEMAYMSVPRVLFLEGTEQMSARHLSSMSQDGEEGIEPVQVVTNVHVRQLNPQLNDKERFNYEELQRKXQEWPGVVHLLQTVPKPACLVAHNGLNFDFRILCHELRKSDLFRTHPIPEQVYFLDTLSCFYELEKEYNREIELTMENVDWTLVLSQFQPNSETVVATAEIEETVQQNGTASEGTQNSNGHKSTTVLHRLFDQKCSLTSNANGLPNSHKKINPILRHWSLALPLIMFMRKTHWSPAKRRCIDAKFFESNNRGEWNFNGNHARRLLCGRGNFKLENMFKR

SEQ ID NO: 169769 - protein, 130 aa, Heterodera glycines
CDIGTFASNRIFLTLRLQRTLPRKDTRSQTSTQSKCSRRSTSSRSNVKLGKARLTKSSQIKVPINEEEMMRFPGMEEGSQKSDKISVHRRFWQLNCKGVHFSGLPTWLQDNEFLHFGHRPPLPSFGSCFN

SEQ ID NO: 169770 - protein, 390 aa, Heterodera glycines
  unsure (1)..(390): unsure at all Xaa locations
FVGCAHIKSEYVVLPIETQQQEGGNKPPNESNPLEGNSHEGILPRNVRARGMDRQREQKMAKARAENRQKIVRICPSVLFESEGRKCKYGEKCDAEHSLTKYWAKKPPDIGXVLAPNAKHHLSLEGPSCFLFDQMGKCSFSLSCCFARAHTNESDLSQKSKAGHSEWQSVLNTHTLPIQQQLRKRTYDFSRSERALHESPSGCMEREAPKWDMRTLRGKKYLAPLTTVGNLPFRRLCVELGAEVTCGEMAIATHLLQGLPSELSLMKRHPSEKIFGVQLAGGYPDSLGKAVQLITDNFNVDFIDLNLGCPLDSVNEKGAGCSLANKSNKLVSVLQCMQKSATGVPVSVKMRYGVKEGERTAHYTMGTIAERSPPQLLTLHPRSRGQRYTR

SEQ ID NO: 169771 - protein, 45 aa, Heterodera glycines; identical to SEQ ID NO: 132754

SEQ ID NO: 169772 - protein, 158 aa, Heterodera glycines
DLLHVKLLSVIAIQFFPYLQINTNITTSGTLNEGSGGGTGTAAPGQNNTNGDITGGSSAAAAVAGNVHRCQSPIMEAEVAEDTSNKMFPSHEQSQQLQQQPQGVKKESVGSSNSTTSSTRVASVVHPIETTKDSKPKPSVKDNTTISPQALNSMLSGS

SEQ ID NO: 169773 - protein, 49 aa, Heterodera glycines
EWDKIGNQNCSTNSTKLLIPTSLSSSAFCARFFRETQTESRDLASATLS

SEQ ID NO: 169774 - protein, 206 aa, Heterodera glycines
MQIFVKTLTGKTITLEVEASDTIENVKAKIQDKEGIPPDQQRLIFAGKQLEDGRTLADYNIQKESTLHLVLRLRGGMQIFVKTLTGKTITLEVEASDTIENVKAKIQDKEGIPPDQQRLIFAGKQLEDGRTLADYNIQKESTLHLVLRLRGGMQIFVKTLTGKTITLEVEASDTIENVKAKIQDKEGIPPDQQRLIFAGKQLEDGR

SEQ ID NO: 169775 - protein, 146 aa, Heterodera glycines
MCSISNCTVVFKINVEPLTRKQFLAIAQRGSNTEYNPRRFHAIIMRIRTTMGKTVAALVFQSARVVLTGVPHPSSVNKMAARVFRRIQHTQSITLCIHQLRVVNIVGVQTFPKRISVERLQNTLGGIYDPTIFPALRCKLSNGVKA

SEQ ID NO: 169776 - protein, 137 aa, Heterodera glycines
CHAKRILHRDLKPQNLLISKNGELKLADFGLARAQSVPTKSYTAEVVTLWYRPPDVLLGSTDYSTHIDMWGVGCILFEMLARKPMFPGNKVEDQLDLIYRKLGTPTPQLHPRLCALPAFNCHPRHLRRHSPRALVCL

SEQ ID NO: 169777 - protein, 24 aa, Heterodera glycines
TAKLVPTVAFSCLALSNNLTIFET

SEQ ID NO: 169778 - protein, 43 aa, Heterodera glycines
ILSLKYFQKFSWRRRLPPLHKKFFFGKSAPQKSVLLIFKFGIK

SEQ ID NO: 169779 - protein, 61 aa, Heterodera glycines
ILYNRCYCVYLTDQSPPLLHPLVFHFDHQMDTFRFLSPSLSIHKRHTLSSALIVLLHINCE

SEQ ID NO: 169780 - protein, 139 aa, Heterodera glycines
SQPFFPCIHSIFWTRNSVFRKLTSRPWSTNLPFPQQTFLTQQNLGLALHCSTLIKTNEFCLGLTCPVPTEYTREPKNKTFFVCPFWRIENVQSPRSPFTNTAPPPQSQISRINQFHSRLVSQINNSLPTPRLRGRRTGR

SEQ ID NO: 169781 - protein, 70 aa, Heterodera glycines
VKPAKRLSNLIPHKLTFTESILNVKKYIKFIQFDNPWHENWDKNDCQMMRNNKKHHFQISCILSGAIVVR

SEQ ID NO: 169782 - protein, 209 aa, Heterodera glycines; identical to SEQ ID NO: 162875

SEQ ID NO: 169783 - protein, 119 aa, Heterodera glycines; identical to SEQ ID NO: 165550

SEQ ID NO: 169784 - protein, 168 aa, Heterodera glycines
LPQITNCPLMPTFANKCLPLELLYEIVPFIPAENAAPNALSSCSLLHKLLLPRVIKWKEKAMDERIIELFDQFKEEMEQKLMNKLDEIKEVLSLEFNQKFDALEQKFEQKFDALEVRVGRLERGTATNTNQGKKSLNVHERLDLIFEKLGIIRVNKSRSPEPSCSNTL

SEQ ID NO: 169785 - protein, 150 aa, Heterodera glycines
MVKVEKQISSGTSDDPLSLVDSIIKDHFLNDLKHKQLTPVQACTLRHMLANFDCVVQSPTGTGKTLAFMLPTLQILVQKKLTGAGEGKEQPTSVSDSCRILALVVAPGRDLIVQLFHLFSPLCKKLGLSTLKLHGAGGKQKKKSPKKHMK

SEQ ID NO: 169786 - protein, 159 aa, Heterodera glycines
NLTSFENASFFSMFKIVLLYHIYSAFIYCKPLKNNCDGIHHYNFLLLLFAVLGYIPYNSLINAFFKFWVLICQIFDYLLCILFLWAEMSWLPNENLLDVFAFLSDVRLLRSVSFVCHRFWRLSELALFKFHPMVAKSVRIGWDPKNASHYFFVQSVKCA

SEQ ID NO: 169787 - protein, 82 aa, Heterodera glycines; identical to SEQ ID NO: 165540

SEQ ID NO: 169788 - protein, 66 aa, Heterodera glycines
SEPLPVLASTGGGGVQRIREADPVFSLTSYGYIPMISIQCSFSFLNLLFPQEKYDHIRWPFRRCDF

SEQ ID NO: 169789 - protein, 67 aa, Heterodera glycines; identical to SEQ ID NO: 165536

SEQ ID NO: 169790 - protein, 92 aa, Heterodera glycines
MPSEYGIETDSVTLQRFVLNEQKKFPDATGDLTTLLTSLLTAVKAISSAVRKAGLAQLYGVAGNVNVQGEDVKKLDVLSNEVSFEGGGHSFV

SEQ ID NO: 169791 - protein, 124 aa, Heterodera glycines
IALRSVPTPYIPPNGYSARLAHFIPFPSPSPRRVRRKFLVATTFFAYQIFAINAHLFKKYSILLKCSVFCYILRIAVHLKESVIEQISQISRKVQAVAVKIVYIKTMAIRISALGPFSKLMCFY

SEQ ID NO: 169792 - protein, 130 aa, Heterodera glycines
SRPLVRSDGMERDYLTKKGCHCLSHHLPLSPLVIDELNCLALGAPIPPGSTLLSRELLIPEGSKAAVVMQRAKTAMEWLREMANSRRYGRISTATSNGNILHKLTFAIDGSTEQFKKVAGEGISLCPSVA

SEQ ID NO: 169793 - protein, 140 aa, Heterodera glycines
VKRCIVLQELKKSTEAMEQNNEQMPSQIQLDFHVFTLPYVLPHYACLSLFDGEIHHGAIATSKQRAKISCAAVLCEVLVKMGWADVKRAKKRKNSDGEKALKKKKRKGENGQTEDVEEGNVRLSHQFLLTLHPNESLDPT

SEQ ID NO: 169794 - protein, 57 aa, Heterodera glycines
DLYNAYFCFFRGFLCLMIRRLFCANFVIFGTYFQDFRKIFFLGKNFWLINYLNYPYT

SEQ ID NO: 169795 - protein, 79 aa, Heterodera glycines; identical to SEQ ID NO: 165527

SEQ ID NO: 169796 - protein, 94 aa, Heterodera glycines
PNYILFACFSLINHLFLMAPMCNDFAFSNRYCVALCLANQNDLSLSRLQNELLGGLTAGISGHPFNHNVRSALLCTGIYVLYSHGKVGQWPTSC

SEQ ID NO: 169797 - protein, 146 aa, Heterodera glycines; identical to SEQ ID NO: 162866

SEQ ID NO: 169798 - protein, 118 aa, Heterodera glycines; identical to SEQ ID NO: 164421

SEQ ID NO: 169799 - protein, 339 aa, Heterodera glycines; identical to SEQ ID NO: 162809

SEQ ID NO: 169800 - protein, 211 aa, Heterodera glycines
RKQTAQQWPDFSKRCRALIKQWQKVAEYRPSSSCEGSSNGGTPQLVSPALKRGLTPRAGAVTTPGKRTTPHQPQQQLRVTSTGLCPPDSRQHTGRSSSTLASSVSPVENGVPTASGSYAPLPSTVKKESPRQITATVQQQHSIHKSASVGASLSCLGGSSAAKRTGPMLNGIAEDGGTVSGGAHLASSSFYADVTKDLRAVQPSLTAPSAP

SEQ ID NO: 169801 - protein, 97 aa, Heterodera glycines
MALTPASLCCGTADVTKDLRAVQPSLTAPSAPLASNPPLTLKLKRSASGVQRLTSSLSPPSDNGIGAASTSSSAPLVAQQPLQQLSVLAARQQNVQS

SEQ ID NO: 169802 - protein, 89 aa, Heterodera glycines
FHFQTSDSANWARKDFFAALLNTLKQDFIKREFRQRTVKKKKKRGKKKVKPSDFFCLQRLLIYTLTQRNARTMGQLPLVLAYYFRVSNT

SEQ ID NO: 169803 - protein, 85 aa, Heterodera glycines
RAKIYAKCAIWRYEQFCLTLARTHSAVALSLAFSLALSTLSLSLNLSFSLSLSPLSLTLFTLSLTISRSLHFITVSLSLSILSHR

SEQ ID NO: 169804 - protein, 181 aa, Heterodera glycines
EIADEEEGICTDTVQQNPLDCLRCFSPIKCPVRLPCQHYFCRLCIADEKCCVICGHPIGCSELVEDKVLNYVLESSSEVTETCANCDQISQPMFFCDTCHQPLCSGCRETTHKAKIFSTHHIFELEERGRLRSRPICPQHNEPFILFCLDSKSLMCIECFNSSSLERRGHFVNIELAHKIC

SEQ ID NO: 169805 - protein, 158 aa, Heterodera glycines
RTFDEFQMASQKQLREKKCSEVEDKTNDGTEREMTNSTSNFYKLTKTDSQSSVEQNVANLERNLSSNLVVPSTSGRCANRRDEEETSNPKNAQLSEQTKCTPEQHEEKTDECPPKESNVRLTNKICKRRMNKVENVAHLNGRGGIGALGWQATLPSAR

SEQ ID NO: 169806 - protein, 205 aa, Heterodera glycines
KKNIKLPNGGSSARKCADCQFVFPNDGCYNFFLANNPPAPMDGRGQRQRQPICQWRRVCRACGRIAYVATHQCPRDQPADDGICRRCNGPHTVDEPCYIQPIDDGSVRQRASIAVDNDDNSDDNGDDDGEDDVLPLRLCFFDAETSQDSPLQLNNRLVQKHVPLLIIAEVICERCLQVGISVNDGLGRRAPGCVCMTGMVRGQLF

SEQ ID NO: 169807 - protein, 252 aa, Heterodera glycines
MPSSSGSEKGNGRNGVRGEEEVKGGKEIASKTLNIQSKRFYLDVKQNDRGRFVKLAEVAMNGRKNRLFMSMRICKNIKELLGKFEGHVPASEEVNGKAENVTIQSESIVTERRRYYIDLRENRRGSFLRITQLETHSGIRNSVALPFEGIGQLHDALDSILEEYGEGFIEEEAELPHSQMIRTDGKSFFFDPGHNSRGDFLKITELKSFMGVRNSVVLSIRAIPQFTQVLSKLYDDFQELRAVEEVNVNNVL

SEQ ID NO: 169808 - protein, 273 aa, Heterodera glycines
  unsure (1)..(273): unsure at all Xaa locations
MSYDPYLSGTSSNARRLLGAPPSLSRDVITKSFVKMDCSHEASLGTECSGEESEAAKTADETEGELKPSQRDEEEENGTTGKRQQKRRKRRIRLTDIGPKAKKKAERREKPMAEKKNEVQDETNPTETHCQSSKMSPPLLEIENELGQNPPNKVKPSPHFFTPFQLLCDNLIRKFMAKDPEKYFAQPVTELEAPGYHSIVDYPMSFSTINDKIDNNMYLNLDQFKSDICLVSDNAMLYNNTGSVYFLAAQKLKVLAKYYXXEKYLLFLVYSLP

SEQ ID NO: 169809 - protein, 207 aa, Heterodera glycines
MNSQQLDDLNSCLNQLLRTIKEDTSEFPPSDLLDEIKQCLDFLANSPKILAKQRAEYISLSWPADLRVVLNRLLRTFNIPEEYVKLCFELSNCAAQSLGADWLKSSDKQFLRLLASLSSCRLRILLDKPEEIDMAQLIACHQLQEYFCGCVEDEQSWMSDDDATFVSKCCQEAAALCLFLHSRLCPSIVRHHFANGSFLCPLSFHLC

SEQ ID NO: 169810 - protein, 135 aa, Heterodera glycines
MAYELKRTDNLATGDEVDRTPKVIGIRVDEAREKVFFDLDGDLTLGNHYALRIPYSGPIASKLSGLYLTTYTTLSGEHKCAAVTQMEPTDARRMVPSFDEPEFKAIFRLSVTHPKGSRAVSNAKELREQQQTEET

SEQ ID NO: 169811 - protein, 47 aa, Heterodera glycines
FKLGDCNYRQLKLFLYFKSLIWCPNFLLTFIYNFAYNNSLNKCLDNL

SEQ ID NO: 169812 - protein, 80 aa, Heterodera glycines
MTTIIFNKGTVLAFFGFIFGFINFHVKVLNQIIHLSIQKLTMPLFDQFPPSVIENNFIGWNLNIQLSETLEKLLMVQVYI

SEQ ID NO: 169813 - protein, 158 aa, Heterodera glycines
TFDITVQNTASNFLRNNYIFITVGKLNSAVETIDQQFIEVQKYSKQDKLLEMLKTDAIWRPRPNEDPFLKPAKKTLIFVETKRNSDRLAIALTQEKFYNTQSLNSDRTLEQRHLAVRKFIQGQYDILVSTDVAARGINIPNVEHVINYDLPEKEIDTY

SEQ ID NO: 169814 - protein, 51 aa, Heterodera glycines; identical to SEQ ID NO: 165510

SEQ ID NO: 169815 - protein, 302 aa, Heterodera glycines
MCRLQATHLLARLFLLLALCTALVSSLTAVAPPFGQLSVSGTNLVGANGQPVQLIGNSLFWHQWYPQFWNADTVKALKCNWNANVIRGAMGVDEGGYLSDANTAYNLMVAVIEAAISNGIYVIVDWHAHNSHPDEAVKFFTRIAQAYGSYPHILYEDFNEPLSVSWTDVLVPYHKKVIAAIRAIDKKNVIILGTPTWSQDVDVASQNPIKDYQNLMYTLHFYASSHFTNDLGAKLKTAVNNGLPVFVTEYGTCEASGNGNLNTDSMSSWWTLLDSLKISYANWAISDKSEACSALSPGTTAA

SEQ ID NO: 169816 - protein, 141 aa, Heterodera glycines; identical to SEQ ID NO: 162855
  unsure (1)..(141): unsure at all Xaa locations

SEQ ID NO: 169817 - protein, 147 aa, Heterodera glycines; identical to SEQ ID NO: 162853

SEQ ID NO: 169818 - protein, 291 aa, Heterodera glycines
ELIREPMFGNYYQFDGTFLESDVLEPTSVTALANDSKALLDARAKLWDEKFGNDKCTLQKIKEMGIDSLVKKIFDSSVSEEAMEENETEQKANGNVKLHVEVKRSGIKNKNGAEIYCSDNFPLVIDSSGLLNRFLEDEPIIRHAPDRKFGVWCAPRKYSIDGIQWKIVRIDPESKPKKSVPNGVSKMNGFSKECVSNGGQTDECISSSPSTVPSLPSTTVRNSPKLEEEEEKVDENELFEGLICSQNETHFLVFSPGRRWLGRLDKAKCGKDSASILGMWIQFKIKNKAGM

SEQ ID NO: 169819 - protein, 134 aa, Heterodera glycines
MGSTDQTKALFSTLIQRPTLTDQLLQRPPFKFIHDIVHETLRVTGFLDGLFTSDELDSTKAGSSRDNKMAFLQKLIDALNMDGHLDDVKPAKIVAGKEAEMTNLLLQSFASEATMYAKQDNNKQQQGDVAVKKS

SEQ ID NO: 169820 - protein, 171 aa, Heterodera glycines
AIHRDYESPFSGYIEMHEHTSAFCFTMVERDMRIFYDSGAGTPMGRYTLVLHGIVQGNYLGNDSGLGLPIFFFWFYWEGRSQTNRNGFFRSRLFLAKVQMLKVMALAWGKELLTSPIEVLLNVFFNRMDRSLTIKNLYVIIITENCLALGRCSIGSLQVSLIFLVELLQKK

SEQ ID NO: 169821 - protein, 113 aa, Heterodera glycines
MMSNATKNILGTPTIVDNVSFDPKVSANFLHKAIEEKRKDEIIHLLCTISNQQRQELAREFKQLFGEDLSAKLKKALSGDFEELILALLEPPAVYDAQQMHRAMSGLGTRESV

SEQ ID NO: 169822 - protein, 227 aa, Heterodera glycines
NCKRMTENRRAAREIQRQQQKQQSLLKKIDFCSSNVFDLLDRPTVGTSLAPISAVFDAIVDAHLFGKNRYIDHTVVAFLHRIRRLFRHSAIALKMVIWPQSVRAWHVMAQQIWPLAASNVCQLSVDSYVFSRLREFVSPSVLRDCANLRQIESDGLFPEGPPDDHPHASDGQALAKWLHTPRADGRPKLLNVEAMTGQFHEQIERLKENKQEDGRNKSKTPKNNFYW

SEQ ID NO: 169823 - protein, 159 aa, Heterodera glycines
MTTVGILGGSHQWFPADQPAELICAASVSSLVERVEWKRAGGDALPSDASDEEHRGVLRFDPFKPADHAGEYECNAYRNEEVIATSKVEVHPEGDTRPDLLHVDISPPQVRMVNAGDSIVLDCVVHGRSADEFTYSWSLARGGALIRELGRQSQLLVKS

SEQ ID NO: 169824 - protein, 201 aa, Heterodera glycines
SIVDEILLILGKPNAHDQLKGALYVLTNGKEQSLLLRQDWAVLLQLWPALCLVDNSENKQSIIQLTDLARDLIVSNFSSFQIEYYLPDSVMPLAEQLLSDYPGICHKPAWPLPDKQKLGEFREREAEICGRNRENFLALAEKLLTIAKDENLHWRQVDFAETLLSLLLRKDCDLPEGVVLHFFKLLTSDIINTRKIAIGFC

SEQ ID NO: 169825 - protein, 271 aa, Heterodera glycines
  unsure (1)..(271): unsure at all Xaa locations
MDRSILVPYTSRLMSEISPGQTLNIHGNVNADAHRFEVNLLSNCVEIDAHMGSAPLHFIVXFDEGKVVLNSFAAGEWGKEERHSNPFTKGQPFDLRFRVHEDRIEIFANQKQITEFKHRILYTNVDHIQVRGDVTLSGVHWGGRYFELPFQANFHGTSLKSGQRLFVYGIPKGNFSINLIGANGDTLFHLNPRFSEKKIVRGSQKDGVWGEEEREGAFPLKKEQAADIAVFNEPYSLQIFIHGHHYCAFAHRVEAPNTDYNLVPVEGDHGL

SEQ ID NO: 169826 - protein, 199 aa, Heterodera glycines
MCHIETYIFMDFETTGLFDDGHNNPLTNPNRSNETARERAQRLDNLIKSDGNRFPKITEMAYMSVPRVLFLEGTEQMSARHLSSMSQDGEESIEPVQVVTNVHVRQLNPQLNDKERFKYEELQRKVPSVLLKQSDLTCKCTFAQEWPGVVHLLQTVPKPACLVAHNGLNFDFRILCHELRKSDLFRTHPIPEQVYFLDT

SEQ ID NO: 169827 - protein, 170 aa, Heterodera glycines
NAWTSYKGYDKKPYCQAYYPKTVPSAVAATPEMEQAKRNTAYQSQVKYHEAYEKQMKGTKMEVADDPETMRHKANMVNQSLAHYHGELQKKEKQDSQRDTTAGSAPSVGFAVHSSPSLDSLGSAISTASSVVRPSNGSSSGNIGHVQQNIRRNSPQQHHQQQTYSYGQLF

SEQ ID NO: 169828 - protein, 154 aa, Heterodera glycines
TSGSPGCRNSARGFNNHANHFMPNFCIPPPPPPQLPQPLNSARVFFPPVPHHHHPAYYLQPQHAHPHMNPQFFNLSVPPPQITQNISSLIAANINNYPTRHPLNGTHQITTSERFSKTFHTGHANGFTSKGNGAPLSRSRKRFLEQITNEEGWI

SEQ ID NO: 169829 - protein, 155 aa, Heterodera glycines
MARLSSSDVYKHDHFLHFDHLHIDNIHCARKLVVHLRPSERTLLLQALTELNAEAKTDGNGHSDHPPSPAQMKQLFFVNTIPFVGFGVLDNMIMILAGEYIDLYLGTLLCISTMAAAALGNIISDVAGGGVAHYVEQFPRHLGYKHPVLPPKQLE

SEQ ID NO: 169830 - protein, 83 aa, Heterodera glycines
FTTCRCLSPSAASSASRKESINIMCCIVKRKYYMSMYVCIMIVFCKPSLIVISRSLPFPSLISPLFSPSVLLLLLVPVCWLHS

SEQ ID NO: 169831 - protein, 47 aa, Heterodera glycines
QPEMCQEIKHWLFVKFIGTRIHNNLKFIRNFFNFKYSFSDFNNFILI

SEQ ID NO: 169832 - protein, 182 aa, Heterodera glycines
ETVNLYSFIPNEEWEVMSFKIHRVVEKFVCCDEPWVLLHASLVVRRKPLYYIVNLVLPTSVITLVAVTGFFTPASTSNERREKLSLGIDSLLAMSILMMMVSEQMPTTSEYVPLFGLFYLSIIVIIFSGTLITALVLNVHLQKTYNRPIPPLITFIFFHKIAPWLGIRPSTILLELWQETGV

SEQ ID NO: 169833 - protein, 105 aa, Heterodera glycines; identical to SEQ ID NO: 162844

SEQ ID NO: 169834 - protein, 147 aa, Heterodera glycines; identical to SEQ ID NO: 162842

SEQ ID NO: 169835 - protein, 188 aa, Heterodera glycines
DGQKFNLENESRAGALNSKEWMETEMPFSHSLETPQFFPIKWQFVPPPLTVSHLSTSSALCPSAFVRNCNVGQPFWSAREALVVQLREFGSVLLHVGDGFHALKFRLSLCLFYPFVCPFACLAFLQRVIVAHVSLHKPCLGRAVLAQWTLVQRDVQVVLRNVPRCLPYVQTAEAAPVEVLRDTGGQAP

SEQ ID NO: 169836 - protein, 156 aa, Heterodera glycines
MDAPADAPGVHLFGTVVPKEVFLAQLFYLLYFASFGSLFPLLAVYFKQLGLSAAQAGILLGSRPLVEFVASPFWGSFADRFRKGKLLLLCSLCSMVVFTLAVGFVQPLTPYCVVLDQNSTGGECKFLVPASEIVRGGALGYIKKVAGIGRRRRGKT

SEQ ID NO: 169837 - protein, 152 aa, Heterodera glycines
DNGPLGGRHFRQTTVGGMAPIGRTGPAGGIGAMGDCPVAHTGKDSKFGCCCCWFVCCRFSRALPRIDESSEWFSSCAVHPPFGFAVVVDVPPPPCVVVVVVSLSLLPMPKMPKVPSTIRRKVKRAQKVLKFASWVILILCSLYGGLFLSFCE

SEQ ID NO: 169838 - protein, 158 aa, Heterodera glycines
VSLAPFPSMKMAIRSFLGPACCSPTGAAVLLLISGLANTVSLASIATGNGARLGIFRPTRSISYDGQQEETEYEVEPGFEKRSMTLGRLSFRPGKRWSFPVSGAYAHDRQNRRYDLLLLSEKQPSYGLAPSEVEYNVPIQAKPSVVRHINFRLLPETG

SEQ ID NO: 169839 - protein, 72 aa, Heterodera glycines; identical to SEQ ID NO: 165480

SEQ ID NO: 169840 - protein, 136 aa, Heterodera glycines
QLAHALEISFLPPYPPNGILDQYRIRWTVHGKFNYREQRVPAFELECSDSRMRGRLCYRISGLEPEQEYEIQAAAHTERGDWSDWSEPLVTKTTEQDIPVLEHPLELEFAKSTSIGVRWRGLEENLAEHITGYALE

SEQ ID NO: 169841 - protein, 71 aa, Heterodera glycines
  unsure (1)..(71): unsure at all Xaa locations
KEKLTKSYEKRNFKAKKRKKKEKHMIKKKRKXSNETKSHEKEIFKLRKEKRAKKKRKRKAIKKKINFKAKK

SEQ ID NO: 169842 - protein, 146 aa, Heterodera glycines; identical to SEQ ID NO: 165473

SEQ ID NO: 169843 - protein, 136 aa, Heterodera glycines
MLLDNALKASAVNSGGEMPKRMSYSSVVMARSSSSSSASSSISSSSSTAPPPPLPKSSSASSSFSSYLSCSSSSSLAANREFVPKNKGEPKKMPKRHQQRWKRWRTVTSESAFFYRSSSSSLLSLDSATSTTTSSS

SEQ ID NO: 169844 - protein, 110 aa, Heterodera glycines
  unsure (1)..(110): unsure at all Xaa locations
WHVLPLHPPLLLPSLLLPPPXPPPPPPLPKSSSASSSFSSYSSCSSSSSLAANREFVPKNKGEPKKMPKRHQQRWKRWRTVTSESVFFYRSSSSSLLSLDSATSTTSSSN

SEQ ID NO: 169845 - protein, 47 aa, Heterodera glycines
DIVADCSDNVATRYLINDACVLSGKPLVYGSALGWEGQFTVYNNGTV

SEQ ID NO: 169846 - protein, 55 aa, Heterodera glycines
FVNRFSSKRPIFATKRRLFCLLKLPFFAARFFQKIGGWRGASGGAKRRRRGNFCN

SEQ ID NO: 169847 - protein, 149 aa, Heterodera glycines
MQMRVEWNEQQRRRLYRIALNFFNKTPDLGVQLLISWGFVRNSPRELALLFMERRGISKQMIGEYLGTLRSQFHTAVLNCFIEQISMYDMEIDIALRQLLKHIRLPLEAQKIDHIIQAFAQHYVACNRNRLCALDTPDSMYILAFAVIM

SEQ ID NO: 169848 - protein, 198 aa, Heterodera glycines; identical to SEQ ID NO: 163094

SEQ ID NO: 169849 - protein, 154 aa, Heterodera glycines
EEEERMSSSRANKFAVAFLDDEQTDETTEANSETENEENLTNESKQTKAKNEGKNKNRKGTKKQKRTKAEKAKEFGTSEQMPMATKKTMPPNETAQKSNLVDDPLERLLKVDLRSLNPDDELRRLLGRTFGAEQRRRGGQQQQQRRIGAAQLGG

SEQ ID NO: 169850 - protein, 123 aa, Heterodera glycines
KLELPAVAAASQLVDPPGCMTSARGNPPVSQRRWYEQKKKAKWIHQNVSFRTSRGLEFRAERMFSAVIQSENEYGRVGRQQTVQTVARPFVRSIFGEWPLRCHCCSSKEREPLTLTTIGKCAT

SEQ ID NO: 169851 - protein, 85 aa, Heterodera glycines
LKIKCNFGEMLCQIGTVGKNAKFLMHIFILFESGDISRLTIRPIKISAHAITVKWYAISRGCMENIPIHKYLLFYTLATDDYNWK

SEQ ID NO: 169852 - protein, 152 aa, Heterodera glycines
MSRSHYDKIMFPPISAHGMLTLDRSKFTKSIQIPFVSVPVKCIDRVRLLSAVRAVCLERMPRLKPWHTPPNCDGSVERLLLFDPDKFGEEATNDLAQQLSQTMDSSPEFGKMAYTMEYEDWDLRRCIQSVLPDGFEFSGFEQCGHIIHLNLR

SEQ ID NO: 169853 - protein, 62 aa, Heterodera glycines
ITTFRPSVPISRAINKLHQKLDPPTDNCTTYHNPETNHRHTFSNSDLLFVVEVTTQSIIIIY

SEQ ID NO: 169854 - protein, 88 aa, Heterodera glycines
SRSWSRKVRGIGKDEKEEKLEGKSADEEGEEEEKPEGNGAGEEEKPEGNGAEVDGEEEEKPDGNGAGEEEKPEGNGAEGGGVEGTNGG

SEQ ID NO: 169855 - protein, 156 aa, Heterodera glycines
MENDYATPKEPPYGAEYAKSNRASCKGCKQLISQGELRMAVRFPSRFFDGMQENWHHFECFWKKARKNDINEASIRGMEWLKWEDQEKIRARITELKESDDSAYTPKAAVMTIEHAKSGSSKCYKCKNSIAKGDLRVSSKASFYHLECFHSLGIFQ

SEQ ID NO: 169856 - protein, 389 aa, Heterodera glycines
MFELMLHCLSSAVVDRQQMAVRCLSELVKKMGERILEIVLPLLEDRLRQGGVNDRRGVALALNEIIGNVHREIVENHASSFIGSIRICLSDSDSSVRDAAGQAFAAYHSATSYLAVEQIVAPMLDTYNKTGEPFILDGLCSVMAGPNGRQLFQSLLPKLARSPVNSAALCRLALSTDAMKRNLNKVMEAMLNGDINTSVDEHIQNCIPVLLTLDDEDDMRAMFSLLLKFASKKESAEVASLLLRTYIDECDGMEYSESQLDTLFCGLVGLYNSDNPNVLQNAIESLVALVKQIDPSSYIQLSLLLKRAIKGLASDTRELSSDGCSRGLCVSTGWQPFLAILREALLMGGVEIKEVAANCLSQLIPLSSEAGLRPHVVNMAGPLFRILGD

SEQ ID NO: 169857 - protein, 119 aa, Heterodera glycines
MGFSKTIAFLSLLALFCATIAEENGATEGTEAEATTVPTLTAAAEGGKGGEEEVTTAKPTETSETAREEGEEKHKANEGKAIEGSGTRSLLQKVTCMLFGFFPFRAGCPGKNDIKAESS

SEQ ID NO: 169858 - protein, 91 aa, Heterodera glycines
KHHLILMKMNLFLRFNGRSDEFRQKQLTICVVYIVHVFGVAAFFVQMVPFFVHFVTFFAEFKASRNFRLPFRIPLESKFKFCPNILPRKLN

SEQ ID NO: 169859 - protein, 59 aa, Heterodera glycines
IFSRNIKFLFYYAFNYVYAFSFMTNTDIKFYLFFYLCLLPCENLVFPINKLTFFNESIY

SEQ ID NO: 169860 - protein, 76 aa, Heterodera glycines
LKIKCLIFKTGIPPIIYLAFNKTVRRDVYIMLVRPLAMVLPCITVPPELSATQNFGSNSRVAGAGTRIVSISLTVQ

SEQ ID NO: 169861 - protein, 167 aa, Heterodera glycines
KSAEEIARKIGKNRRPSGDVVVLSLHWGGNWGYEISKTERDFAHQLIDSGTVDILCGHSSHHPKAIEVYKGKLILYGCGDFLNDYEGISGHNEFHDELTLMYFPVVDGKNGIIIRLDAVPMKINKMRLNRANAEDSLWLYRTMARECAKFGVRVQRDEKTNVLSFLW

SEQ ID NO: 169862 - protein, 160 aa, Heterodera glycines
NHWPTMGQSQGIPQSPPEGPSQENNGRTAQPNGATDEGIFRVKVSNCPNTSPRNLRQTFQMQHNRRQSRSKSLEPNAALDIRTIGHRKSSRFGTKTELKKRGQNQNLWNPEKAATQIIGQQLQNPHTQPPTIQLQTVSIHLKQFRNQNGKTDLLEDNKKD

SEQ ID NO: 169863 - protein, 64 aa, Heterodera glycines
PIPSFMRHQLHSFLVLPNCLKCIPKNALKMIKPVFSRIFCQYFPIRNDTVNSFASLIHSCFASD

SEQ ID NO: 169864 - protein, 126 aa, Heterodera glycines
MLIMSFRSAAALGLNLRKASKFVLFGALATGGSVLLYSLENSGARAYDFVVHPSHFFWVRRGYQVYKQVCAACHSLKFIRYNHFVDNFMTRDEAKTEAAEKNAFTRRNFSKYTNCCPRIGCIEGRK

SEQ ID NO: 169865 - protein, 109 aa, Heterodera glycines
GGSVLLYSLENSGARAYDFVVHPSHLPWSHGGLMDAIDMRSVRRGYQVYKQVCAACHSLKFIRYNHFVDNFMTRDEAKTEAVEKNAFTRRNFSKYTNCCPRIGCIEGRK

SEQ ID NO: 169866 - protein, 50 aa, Heterodera glycines
FDISPSANRSECQQKRMSKINNSQSGNKALAATRPTFGTAKFNLAVPLPF

SEQ ID NO: 169867 - protein, 428 aa, Heterodera glycines
MAIEAEEFGEQHETDEVEQQENGSGNSEEEEEEEEAPQIRRQQGQIRMMTSSGEETVQATEAAVPPPAAQQAPPQSPAATAAAPQSPAPTQTAAPASPGSAAAIPQSPAAAGAAAAAQQAALEEAKRRQQEAMEKARAEALRLQEEARARAEAARQQHQQAAEQARLQAEQQLKAQQEAAKRQAEERAQQLKAQQQQQQQQSVQVQQQKQQQPPISPSATAQQQKAAPAPAAQPPAKAPQQPQAPKAAVAPAQQQQQPKAAAPPPPKAAAAPQQPKATAVAAPPKPTAPPAVAPQKRAPSPVVREVQLPEAPTQPILRHAEYTPKLVDASVNKLPPGQEPDEEQLEASAVPRNPIIEDNAWQVQRRVQPEYQPVQPAKLNATGDFLVESEAKKSIVPEAVGYSKTKWNEFPEEEEKERQSVPKVKRRN

SEQ ID NO: 169868 - protein, 136 aa, Heterodera glycines
MNKSLAAPVKNTAGGKVEGAVAAPNGQHSGRQRHGGGEDGSGRRNVTRWGTAGSGGGGGGRRTRGRMARDDRFQFASVAVPIPRGCPLVGTSVCCCCRCACCCCSSLLSQSTVVPPCCPITTTTVLSFPSSMVLPC

SEQ ID NO: 169869 - protein, 140 aa, Heterodera glycines
NKVFPLSKNILSNFLSYFLQIVDRVRVHRHSLCAGGAAGPSSFCCPSSFSSLSISTPPLAPNHHHQQPKQHFHQQQQQQLSFISAPCALHSSHGPSTTTANAIPAQLFMLSKNGRECSKLREMVSSLGEQLNVPSTTKIS

SEQ ID NO: 169870 - protein, 208 aa, Heterodera glycines
  unsure (1)..(208): unsure at all Xaa locations
QLYLFNHSCTSFNHSCTFSDHCCTSSNHFCTSSSNLYLFNLCCTSSNHFCTSSSNLYLFNLCCTSSNHFCTSSDHCCTSSNHCCTSSDHFCTSSNHFCTSSNHFCTSSNHFCTSSNHCFTFLXSSCTSSNHSCTSSDHCCTSSDHCCTSSNHFCTSSNHFCTSSNHFCTSSNHSCTSSNHSCTSSSKLQNFWKNSNFQKKIHNSVLKR

SEQ ID NO: 169871 - protein, 115 aa, Heterodera glycines; identical to SEQ ID NO: 162762

SEQ ID NO: 169872 - protein, 238 aa, Heterodera glycines
SWSSPRWRPLINSGSPGLQSLGTREQRQRDELREQFLNSEKRNQILQSEKEELMHQAEQAERARRAAEADLIELREAVNDLSNQVNSLNGYKRKLEGELQALHAELDETLTELKNADELSKKASADAARLAEELRQEQEHSQHVDRLRKGLELQIKEMQVRLDEAEAAALKGGKKIIAKLEERIRALEQELDGEQRRHQETDKNYRKAERRVKELDFQVEEDKKNTERLTDLIDKLQG

SEQ ID NO: 169873 - protein, 193 aa, Heterodera glycines
LVMYIRELESPDEHSLVLFNPLRSCFRPTRDELFSAIACQRRSIVRLNTERARFVRQNGALLRMIVRLTGGIPPNFNHAHFAAAAQPVVNVTAVIANANPNGQNYNRLQRLHAELSETIDRFTEENSLLGYMNDQLTEQLEPLTEVPPNANFNLDDVVFHPPLDQQHEVPPNPNFNPALLEFDDVGLQPALDQ

SEQ ID NO: 169874 - protein, 156 aa, Heterodera glycines
LNNVDYAGLRSDNSEVRRKQLDNIAVAALEFQPKGNTLETTEVKTEVPFLIRGDLREYQLVGLDWLVTLYEKNLNGILADEMGLGKTIQTIALLAHLACDRAVWGPHLIIVPTSVILNWEMELKKWCPALKVLTYFGTAKERAEKRKGWSKSNAFH

SEQ ID NO: 169875 - protein, 163 aa, Heterodera glycines; identical to SEQ ID NO: 162817

SEQ ID NO: 169876 - protein, 266 aa, Heterodera glycines
  unsure (1)..(266): unsure at all Xaa locations
PRELIGSLINNKNRLIWQFSSFSSILFNKSRKKQLNFLHLNFLRSTSASSSCVESFPEWRHQNMSNEFSPSNWPILPTTVQPDSEQFKQNEAEMAESISEFKNVVDAVIDGQMVEKTVIERHKNKGKLLAIERIEQLIDQGGSFLELSQLTAYKVYGQEKVPAGGXVAGIGPICGRLCVIVANDATVKGGTYYPITVKKHLRAQEIALENCLPCVYLVDSGGANLSRQAEIFADKDNFGRIFFNQAQMSAKGIPQIAVVMGSCTAG

SEQ ID NO: 169877 - protein, 139 aa, Heterodera glycines
CCASLDGVFAFAMADKKFLYLGRDPIGVRPLFYGFAGQALLIGSEVKSIEKLCRRVNFFPPGFCAQIPLGSTFSTDNQQIAFQQFFQIPSIVNYSISAFDAKAIIRKLLVEAVEKRLMDNRQFGFMLSGGLDSSLIAAL

SEQ ID NO: 169878 - protein, 166 aa, Heterodera glycines
ERLFLKMGRRRKTAPALLRNKRTRIDEDEMDEEEEGAWNGHGHQNMGLRPRKQIQRTISAQWAPRLRERHQNGQNTTEDQLADMELEDVDMDEDEIVKTLNMVFTNLDLSQLPALSPGAGLYAMANYAIEEKSIPKRKAAEKKVPEDVLEPTFLSLEQAMQRDQNF

SEQ ID NO: 169879 - protein, 84 aa, Heterodera glycines; identical to SEQ ID NO: 162814

SEQ ID NO: 169880 - protein, 215 aa, Heterodera glycines; identical to SEQ ID NO: 162658
  unsure (1)..(215): unsure at all Xaa locations

SEQ ID NO: 169881 - protein, 158 aa, Heterodera glycines
CRESLGTSEGAKKMLACANTLQNEIVPWRKAFGELRQRGEQLAKRGHESVAERMERVENQAKALEGMAKEAARGAGSVLAVRSFLADGAELEEWMEQQKQTTNIEECGNDLEQCEQLRTKFEEFRQSLRMGDERMAKVEEAEGELISHVDDEKLAQKV

SEQ ID NO: 169882 - protein, 62 aa, Heterodera glycines
NLAKERSDVCCLFNEHEYRRVLFDEYSPKQIQNPGNANSTADCCESKLLPTFKGKGRKLTMW

SEQ ID NO: 169883 - protein, 243 aa, Heterodera glycines
EIVIGDPPGCFTQNEVTTDEEGREVTLEVQPTATRTQLSEHQTNVKKAEMRLGQLNKTLSKKRSELQQTSRHSLSQNDTKRELEVGIEQLEQKLRALYFDPQLDHQLEQERVQLARERGQCAQELDRFEARNFKLRFDYTMPYNGFDRNKVKGVVAKLFKMNEQRYATALEVVAGGRLFHVVIDKVKTGEDLLKAGLPRRVTMLPLDKISANVLDQRLIGQAKRMVGEENVFFPGELIEYERE

SEQ ID NO: 169884 - protein, 197 aa, Heterodera glycines
  unsure (1)..(197): unsure at all Xaa locations
MAMLNASFDKFNISNSDKIRTQRLISMSESCEEWKTCTKRETYALLDQELNKLLTTSPPEKMEYWKYXLDGFMDLFARFLRAKTTVEWSKIEPLPEGAITPYSKLEQTPRDRVRELLNGLVVVKLNGGLGTSMGCKGPKSIISVRNELTFLDLTLQQIQSLNREFEVNVPLXVLMNSFQHRPTTLRSCLKTDPTCLR

SEQ ID NO: 169885 - protein, 378 aa, Heterodera glycines
SVLRLYPTDEVEYGEQTKTEPLSATMFEALSRHFLGIDFRERNAGHRIDEHMRDEGFNVKAYIDGHSGLIFGGNRWNCGTWMDKMGSSERAGNRGEPATPRDGAAVELQGLALCVARGLDRLCRDGAFPYNGMKGESSSFLSWSDWAAKIQHSFEQHFFVDHNCQSEFVHRRPIVKDSFGASLAFADFQLRPNFCIALNASPDILPPEKAWAALEIAGEVLAKNAPYGICTLDPKDWAYNGNYDNDDDGTNRISAKGWNYHQGPEWLWVAACYMSAKLKVASLLLHKSGDSSAWLSAVGEIRQRLFALEQCLNRSDWASLPELTIRAGAFCAHSCPAQAWSVGCVMETLDTLEAMEKEGMNLEGRKSDRRANDKQKKH

SEQ ID NO: 169886 - protein, 58 aa, Heterodera glycines; identical to SEQ ID NO: 165401

SEQ ID NO: 169887 - protein, 164 aa, Heterodera glycines
MKIRQMSSSSDDENELQLSDTDCEAGPSSRKKSKAPKSQTHHRKWGPKASSLEEEDDEDEETLVEREVERTETGRPLRKAAVNMRKKLKEELQYEEEEDEGEETEQRDEEEEGTAAGAQIGRLADRAVSALARPQRTVGNRSEEGDADEFKPDEEDEAEADEEE

SEQ ID NO: 169888 - protein, 47 aa, Heterodera glycines
RTSVSRAKCCAKMPTFCLTTSNPVPAKWRAHAVSAQECKLFNFSVVR

SEQ ID NO: 169889 - protein, 161 aa, Heterodera glycines; identical to SEQ ID NO: 165384
  unsure (1)..(161): unsure at all Xaa locations

SEQ ID NO: 169890 - protein, 163 aa, Heterodera glycines
SEFGKYRPLPSDRKCSRKGCASDPPPATHCQPGHSSENGTVQPTKTSSLISSKNGCAEAEEEQCLFVEHFGPIPQYSETDEKENLRLRKLHEVALEIYQKQRAYVMKLQLIGLNYPRHLNDCEKRMNKKLLHSKHVIRRIADHFQTILNVHLTFLHNFYDKIL

SEQ ID NO: 169891 - protein, 64 aa, Heterodera glycines
VKHLKQLSNRRHQQSNSGEKSRFLNNIWVNCKHFRHLDQPREIGLQSCARLTRHPQKANTHFKG

SEQ ID NO: 169892 - protein, 117 aa, Heterodera glycines
EKNGVSKNRNYAQKASQPILAHPIPSTIAFIHPIMNAKIIRVPKIACDLSLEKNGVSKNRNFAQKASQTILAHPIPSTIAFMHPIMNAKIIRVPKIACDLRLRKKKLEGGPGTQFAL

SEQ ID NO: 169893 - protein, 181 aa, Heterodera glycines
FSVICRTMCQKFVAMPSFVHHHLTLLCLFLGALCAFGAVPSLCQLLGAPGGCSPIAVLSAAQQPNGGGAAAQFQQPFGPAFGCPLNPLGAFGRPFPPPPPPPPPGIGGQFPSMQGQTVNLSPNFMGGGQQQQQNGGNAFGTMGGGGNCNCGTCCQQQQETNGNSNNNNFIGMPTANEFTGF

SEQ ID NO: 169894 - protein, 62 aa, Heterodera glycines
LFFFLIQISWKFPIPDKRNVGRGFRISCLFFQQINFVSVSILVSDGQSMQKWVRDHPGMCCQ

SEQ ID NO: 169895 - protein, 159 aa, Heterodera glycines
MNFFGRKGKKGPVVGKEGKEKGERPSHRRLRVLGVPLAQALRNDPSHDGVPVPAVVRECLDFISLYGLQVEGVFRVSSPKSRLDELERMANEGRTDEIVFQDAHEAAGLLKRFLRQLPENVLTTQLKGRFENEANVCRCVALCRCSAVIKLRELLLQLP

SEQ ID NO: 169896 - protein, 96 aa, Heterodera glycines; identical to SEQ ID NO: 162799

SEQ ID NO: 169897 - protein, 144 aa, Heterodera glycines; identical to SEQ ID NO: 162798

SEQ ID NO: 169898 - protein, 160 aa, Heterodera glycines
VKLKRLDGEWESIELSEVPTICTPIRTEFVIPGGTPGQHCSATDTVQPQLLIGIRRFWDFVQGFRKTAEGTYLIDTVFGTVICGEQFQTTTGVTPDSSVFAIPPCGEDERDQMPSVKAIEQFWSVEAIGIRDDPTQDADTEAIIQFERSVRQHDDGRYSI

SEQ ID NO: 169899 - protein, 70 aa, Heterodera glycines
FFQFLKKFRRQQWYCSPTFFLNFPSHRRHFFEEYPPPSPTFSQIDRVGEEPLGLNMTKFIKHKGNNWKKC

SEQ ID NO: 169900 - protein, 72 aa, Heterodera glycines
MEGKSRSGRRRDCEGLWEKQSLLDPPPPFVLYINCPSLPTSICCANNKMLTPPFPRRICPFDSIDKILRNSN

SEQ ID NO: 169901 - protein, 111 aa, Heterodera glycines
LIVCLFVISRQPSVAFNALSQFSRDFPSPDFSFVEIVFLPITAQINENHLPIVLSFFLFSHNPISDSAPSSGFIECACLSHFLLSVPPPQKGASAVVVLPKPSAGQSICDH

SEQ ID NO: 169902 - protein, 55 aa, Heterodera glycines
FTFSSIIRCATSVAFWRAVCLTNGSTCIVRGKSSGQFDGTTIGSRPFRKRFKFYL

SEQ ID NO: 169903 - protein, 155 aa, Heterodera glycines
LVPIAISDVTHFADFVDVRATRFDNSGLNSSFASHRFECHCVFVHFLLKVVEHHTHFGIRCENNCISIGVSIKKLATEVGLNGANFSLKCAVSPLGALKTSPVSVEEPFDRNRHVLFGALFSGGGVLRQFDVIVLVVSHQQGKVGVWFGIYFVLN

SEQ ID NO: 169904 - protein, 74 aa, Heterodera glycines; identical to SEQ ID NO: 162794

SEQ ID NO: 169905 - protein, 59 aa, Heterodera glycines
INENFQTNFLHLFQRINHFGLNDRILFEFRFTFHITFLRRVYSKKLLGKKGVRRCREAP

SEQ ID NO: 169906 - protein, 126 aa, Heterodera glycines
EGLKNKAQGGFILGNTVFYFFSQVLNEMLLRMDAEVFGALAPAEFSAGVGTAPSSFVSTPHARHRHSYADGPTVPSRSHIPPWAWSRNLEFNLAIHYGRNSGASRIKARFLSSERCDWPKPRKFEN

SEQ ID NO: 169907 - protein, 323 aa, Heterodera glycines
MPKSKIQSASILAEQQKSVFSCQPTIPAADESDDLSNSSHLNCCQPISEIEQHQINDLRQILETQLLKQEVDEAYLLRWLRSKEGKFDEAADGIRKDLVFRKAWGLDKIVNWEAPEILEKYCGYGFLSDHDGNPILMSLLGNTDVEGMLRSVQSKDYIKFSLAAIEKGITLCRERALQTGRPFEQMMLVFDLDHISSAHYSSKQFASSFTTLVLLFQEHFPLVLRKILVIRAPEMGRIAFNSMTPFLSNAIKSMIEMPSEEGWQSALSKYVNLDAWPVHWGGRMMDPNGDPKCPSKIRYGLGPVPDSFFVDPSQAMPDYDPLT

SEQ ID NO: 169908 - protein, 189 aa, Heterodera glycines; identical to SEQ ID NO: 163903

SEQ ID NO: 169909 - protein, 161 aa, Heterodera glycines
KVKAALIIAGRDSLLRGETVEMMMEQYEMIANLCRRFAHVKFFWTCPPYVHDKHDEYEELVARLGPMMSLNPFIPVWVTKKGRSIHELFRFGNSFDNMRVTSDGLMKDAGVRALKAWLFTQSDFSGDQKLKIRTIRSAVHVAASVGLGDHRQPSTSSSGSI

SEQ ID NO: 169910 - protein, 96 aa, Heterodera glycines
LNVCLFLLLPNVLTLPIANSFLSSLFLLLLQNNAFLSLSSVKFPFYHFPYFFIFYHFPFITNCSFSVCCPSAVCLFLLPYVFFYSTEKGQCNCEFY

SEQ ID NO: 169911 - protein, 41 aa, Heterodera glycines
KGAGGKFYGIKSYLNSFYHTPTVVEEIESGKAQEGTTTWSV

SEQ ID NO: 169912 - protein, 146 aa, Heterodera glycines
MHFADLSLSEREKALSVRYLQERDAMFERFSEWTEQDQTDFCKHLLQRMCHHQHGQIDQFLGPMLQRDFIALLPTGLAENVLHLLDAKSLCASEFVSRRWSRVIVNGLLWRKHIERQVRNDALWAGLAIRRGWKKYFFCSKDQATR

SEQ ID NO: 169913 - protein, 34 aa, Heterodera glycines
LIKHFYNNLTNKYYLIITLVPFSFKIKNWENSVN

SEQ ID NO: 169914 - protein, 212 aa, Heterodera glycines
CTDTVQQNPLHCLRCFSPIKCPVRLPCQHYFCRLCIADEKCCVICGHPIGCSELVEDKVLNYVLESSSEVTETCANFYQISQPMFFCDTCHQPLCSGCRETTHKAKIFSTHHIFELEERGRLRSRPICPQHNEPFILFCLDSKSLMCIECFNSSSLERRGHFVNIELAHKICCDKLEKNALNLRIFQEELREQIELRKRLTDELSKNSENLR

SEQ ID NO: 169915 - protein, 161 aa, Heterodera glycines
LINNKELQMALFANVFTTKYLPKEVTLLVFRRSNSEFFCVRRSPTIFEQTRQQHSNSSRRNDQIQQILDQFDKMQLPSQNEPLATSQQQIVQLSERLIQLALTATNLVCNLLQKNGAAATDQFKGQTKMPTVATIEPKNTKRDGRAAENEKGWTWICEKCR

SEQ ID NO: 169916 - protein, 189 aa, Heterodera glycines
AKSTSLYTKFGCKNSCSKKKCIKGDGFLHFSPVPASLQLNATSTPVRAKLVYTFRRDNSSLHHERHERLHGIRPRRACTVVRRRGSLFIVRSRERLHGIRPRRACTVVRRRGSLSIVRSRERLHGSLARVRAASGWFKGDTGANASLIFCFCSRRSPRIRAPTCEKMQQRPADGWTKPEERATCQKMQR

SEQ ID NO: 169917 - protein, 208 aa, Heterodera glycines
EDKKAANNTCSSNNNNSLSDVKQNDDVSSLDSLGVFLNRFRQMDTKKLQQLASNPTVVAQSNGPNEGTAKDTNNDNTSITSTREKMLEVVYGNKLMGKEKQPKFMCFVVDAQERKIRIMSREEQKKQESSAIILEDLTDDQFSRFGKSVKDKEADNSDAFVHCEKCSLFYEFCCLDHPLYQCKDRVPSSSPTEIEDRAAATLPAFLFI

SEQ ID NO: 169918 - protein, 130 aa, Heterodera glycines
DRLNHPDEIQKVEKYVKGKTLQTTYKNQLDEYKDFEYGGITRESARKQMAYNGFKNVTVDQHFYVRHRICLRYSSNPCVIEKHKNGNERFYPLELVKVKDNDIIYLGQNFPKPLIRDDNMFIDDQQYLNW

SEQ ID NO: 169919 - protein, 95 aa, Heterodera glycines; identical to SEQ ID NO: 138780

SEQ ID NO: 169920 - protein, 92 aa, Heterodera glycines
CSSFISFSISILIFLILIYYLLFYILIFIFIFIVVPIGPNLCNCRFDLITPFHFLIYLFSPRLSASYRMPAYKISFLLQFTIHGPSKIYIIK

SEQ ID NO: 169921 - protein, 30 aa, Heterodera glycines
TINFLTYLLVKAHILLSNDILKLHFLGQWC

SEQ ID NO: 169922 - protein, 187 aa, Heterodera glycines
RSTANIRDTISPTQPDQVNWNDITSQLKQLFAETRSLFVRRFECFKIRQQQGQDISSLIAQINASCENADLSLTKEQLKCIILVIALNDEHHDLRQKALKMLDDSQKNGTDISLKKIEEELRAIQLVKESALSLVNPPIATNAIRTRCKFKRKANAWSTDASMRIMWQIRPLALRLHIQGRHLPQVQ

SEQ ID NO: 169923 - protein, 121 aa, Heterodera glycines
MILASSSKRLACQFLIRKVPHFAVTSSRKESNWSEVLDEAVPARKSYRDFQTLNGNQRDALAASLDDSKSMVTVLGSPGTGKTLLVTELVHSMCTKKQRVLVICGSRELLYSTVCRYFRRA

SEQ ID NO: 169924 - protein, 209 aa, Heterodera glycines
MLFPSFGMLSSAIHQNQHRRSVHSVRYHSPLLSWPKLFLISIATIPLLLLSCIDFVSAVSDDGAPFLSDQQKRGGARAFNLFASAAFPPPNEKRSGGRAFGGGIQTINDDFDANLAGELKRAGARLFRMSDLSSDGDSFVPEGTKRGGARPFYGGGYIDGAWKRAGGRYFLRQFDDVPFGGGWMAKRGGGRSFFEGTKGPFNSANYWAP

SEQ ID NO: 169925 - protein, 158 aa, Heterodera glycines
SIIVDLLHGQHKSTLTCNVCSKISIKFEPFCFLSVPVPTKEHKAQSTIVFMRAEKWAKFHVTHTSKTTAGQLKQMLREELQLPSNTQMIIYSTYSNRILKDDSTLSSTYMYNYSMKLYAYAVEPGPVILVENLFMATSPPLFFPRPTKLTRRALLAEL

SEQ ID NO: 169926 - protein, 114 aa, Heterodera glycines; identical to SEQ ID NO: 163708

SEQ ID NO: 169927 - protein, 246 aa, Heterodera glycines
ELQLESEDRYNRFPFSQKEFIEDCPAERLYVRILPEMTEYVIALLKVILASLPSSKAKIDAVTILSDVLTPETDTNEVLSNSISLDLASFSHTNVLEETVRVAIDINRHKELIIKSASSLLILLLKHLRLNHTLQFENLARYLVLANCLPLVLKFLDQNICRYFQAKHELAPFNYPQCALFFVRNGYVCPPLTAENVDGCGGSSDSPSYFLWRNGFSSINLLRVINKLTKGKQSRTQMLVVYKWAP

SEQ ID NO: 169928 - protein, 68 aa, Heterodera glycines
PLLIDCCAHSNSKLSQMSKSSTSNTSYSSSSSSSGFLEAISGEENEQKLKKGEEETLATAAKPIDKAI

SEQ ID NO: 169929 - protein, 126 aa, Heterodera glycines
MIHIAIPSHRTLADHEDPYNKFTVYDIHVNGAFHASVRYNLLYSLHEKLIDLFGFRLNAPDFPPKKLWKLDAKALNERREGLAKYLQGVVANPDVSRHPVMERVFLDFQVKSFSAAVSRMTKLEIF

SEQ ID NO: 169930 - protein, 123 aa, Heterodera glycines
MIHIAIPSHRTLADHEDPYNKFTVYDIHVNGAFHASVRYNLLYSLHEKLIDLFGFRLNAPDFPPKKLWKLDAKALNERREGLAKYLQGVVANPDVSRHPVMERVFLDFQVVSPTFSRSPFLLR

SEQ ID NO: 169931 - protein, 81 aa, Heterodera glycines
QGQCFLVYNCLGLNYVRGLSPYARKVCRSGGSPPIGLPLLSAKFNWPFGSWPNSVSSSFWHSAAPLFWPMPFLWLFFSSIF

SEQ ID NO: 169932 - protein, 137 aa, Heterodera glycines
FMTKLISCRRTAIAWEFSPIVFCPLAVISALFFGVGCNANHLYSEGGSFPVLSSDFSPPIPNDPPTFGSPADLLDNELQQPNQQYQTEFAPSMEQMVDEQRRNRLAKIIEQMRDNGQFSQQEIADGPGLFLEEGEAN

SEQ ID NO: 169933 - protein, 146 aa, Heterodera glycines
SMPRRPKTLNRNGGTSPVSCLGMEVELDAWAAIMNGLQGPAREAEEALFTAFIRDDRHLTEWLEDAREMLAHIAAELADEPNQPIAAGGQQPAVAVNPPVPAVPFVNNAAFLGGANVQQPAAVANHANQPPLVPNNAQIVPNPRFG

SEQ ID NO: 169934 - protein, 110 aa, Heterodera glycines
FYPSFFSHSRICHRTTNFFFCCCFPGSITSQKASKGHAPTTCAPSVSAWHPHFVVFESLNRIPFPSFSTDDGTGNFFLSAYAMSAQKIASDSEWKKTVGFWGIWPEIFYF

SEQ ID NO: 169935 - protein, 122 aa, Heterodera glycines; identical to SEQ ID NO: 165288

SEQ ID NO: 169936 - protein, 90 aa, Heterodera glycines
ASLPTLIAMVMTMVIFVKIFIKEIFDPSFVDSIFSHTIFHFYIYKPIFFFAFFFVCLSETINFCFEIPSSYIKIYQILSTLDPYKLWPTC

SEQ ID NO: 169937 - protein, 176 aa, Heterodera glycines
RRHCSLSLPSTTALCQHITAIKKFHCQLNVLTKLNCITRLSLWLKDQIILFISFPKYHYYLYSCGFLGRKSSFSFFTRFVKLLCNTPKVYDDQDVRWSSVRMSVWWCLCSLWSPSPFMCIKELASFCSKKYRNTTTGKESKFQIFLTYRALFAQNTKFSAPNEWSTPKMVMVSLIW

SEQ ID NO: 169938 - protein, 44 aa, Heterodera glycines; identical to SEQ ID NO: 165285

SEQ ID NO: 169939 - protein, 83 aa, Heterodera glycines
TRINYLSYSPKNGSSSTCCQGKILVLQKSLLLIMLKRNKINLFLIINNFVGPRFLDSYVLLLFSTGCPCFGIFCASPLFLHIF

SEQ ID NO: 169940 - protein, 97 aa, Heterodera glycines
MVVADLAVFQLDLFWTIILGFLIAFVLAFAIGANDTANSFGTSVGSRVLTLQQAYLLASIFETMGAALLGYQVTDTMRKGVIDLNIYEGREKELMLG

SEQ ID NO: 169941 - protein, 51 aa, Heterodera glycines
KRANSPNFILPLHLLILSSPMLSHSFAEVILTNKKDRQQKETPFVHLFASH

SEQ ID NO: 169942 - protein, 108 aa, Heterodera glycines
FGRAFTIECDASKKAIGAVLLQENGPVAYISRALNRHETNYPSIEREALALVYAVKEFSPYIVGSGVTKVITDCSALTGMMKAKELKGRLEKYQVTLQSFELEIIYRP

SEQ ID NO: 169943 - protein, 200 aa, Heterodera glycines
WIPRAAGFRHEGAEEAISKYNGEWQIGSPTDEILANDYGLIVRTKARHHAISARLRKPFKFDGSPLVVQYEVKYEQGQECGGGYLKLLRDDASKDLKQFNDKTPYVIMFGPDKCGMTSKVHLILKHKNPKNGTISEHHAKQPSKSLSNYFEDKKNHLYTLVIRPDNAFSVSVDHTEIMSGNLLTDLEPSVVPPKQIPDPE

SEQ ID NO: 169944 - protein, 53 aa, Heterodera glycines
LSHNICGAFGFSVQLFFSDRQQMNESFQFHRFLSVRPSILLPFYPIIHFRFIK

SEQ ID NO: 169945 - protein, 115 aa, Heterodera glycines
LRFGFICFRMLFVLFFCHHFLLKIFFTMAFPIAFSIFGIFSVLFGNKNDGPKLRVKRSSSVASSASAAGAIAGGANANSNANNAFASFYADDDNTVLCCVCPAPMTLGDLKKSSS

SEQ ID NO: 169946 - protein, 66 aa, Heterodera glycines; identical to SEQ ID NO: 165268

SEQ ID NO: 169947 - protein, 50 aa, Heterodera glycines
  unsure (1)..(50): unsure at all Xaa locations
QHFKNKCIMVSSYIXFISYQKKGLYQGWAKLKNKKRNAKSEICETEKCEM

SEQ ID NO: 169948 - protein, 182 aa, Heterodera glycines
MAIVENIGFSTSNSSAVSSLSFLLRTYFEQLCRDSLNSAINSGRAEVGLDFVSYVFGANGINITELHDYIQQVQPYAADEHPLFPVTEPLNVPPPSSEIADTSERKNGERESAGNDGAEVDEEGNREQNNKHSLNSFNSRSNVRNAISQKIFPNFVGAFAPNLGFSVRKVELPTENVSVDQH

SEQ ID NO: 169949 - protein, 208 aa, Heterodera glycines
MISNLFGTHPLRTEIKKKRPSQRRGNAEEETFHFIIDCHGKFDAKDTRNFNSSLVEEVSRHPALFDFTRDEYKSTEARNRHWAEVAEEMQQSVEFVRTRWKTLRDRFKKEVRRQHQCVEGPIWQHYDKMLYLLPFIRDKDDSTEVGTTVSNGSVGIRSKNGARRAEGPTDNTDRGTTLWHGEREQKRRTNNGNLLHPSPINSCTAAIL

SEQ ID NO: 169950 - protein, 74 aa, Heterodera glycines; identical to SEQ ID NO: 165253

SEQ ID NO: 169951 - protein, 101 aa, Heterodera glycines
MNKMGPTSENDGPKKQKKGGRRRDGMPKPTPKPKGMAAASTALRQLSPLHKVLLVVVALLQWTTTGGRAALLQGCDFSEDLCTDGEVCLPDGLFGQCYSDD

SEQ ID NO: 169952 - protein, 36 aa, Heterodera glycines
IFAESCKSSGIFRIISQKKGTENLIGEVVIAFLIKI

SEQ ID NO: 169953 - protein, 140 aa, Heterodera glycines; identical to SEQ ID NO: 165239

SEQ ID NO: 169954 - protein, 80 aa, Heterodera glycines
RANICVNCCSRLRDHQETRRRGRTEAILYYPEGATLFIKLVSNYSFSLYFSLIFQNGDENDGNTTKGKKTTTGPSAAVTR

SEQ ID NO: 169955 - protein, 39 aa, Heterodera glycines
LIALNHQNFFGGFYRHHRTLKNLNFLGKFLISVFNFCLY

SEQ ID NO: 169956 - protein, 158 aa, Heterodera glycines
IKWYKMSIIDIDAEQNNHSFAVDSQSNNYFLVGRGGDKSILLNETSGNSYAFSNVPTLPSVHYLFKNNKIHFNGIFSYEIHEFFQCSIDNARTLYSIRDLKEFAKACGGGTELIPFFGYALRIVVEAPIELGTDTKTEEDDGQQQKQWGECATFGSGK

SEQ ID NO: 169957 - protein, 160 aa, Heterodera glycines
ATVWSKFASQLSSWLSEMPSEKRRGRAETRPNGGDGVAGVRNSRSLSALSRRHNLVRTSKSSENLHRISLLSTATTIGNGQQRQKPFLAQFGLNGPNAHSEEGSVPCQNSRKGSVEGHQSPLTPARTKTRRFPFFGKENETTAAPGGEGESGYSSGSSSR

SEQ ID NO: 169958 - protein, 212 aa, Heterodera glycines
LATFKTPDNNTKKFCKTKGSPLFKKFSKTRQMERDRILFQRQRFPTVASIHHQPATSSASGVLVPIPTTDGAAAVPGSAGGYQRRYSTHREQQLQQRNRRDSKFSRRLAVYTSPPEDSAAGAISLRPLNTTIISSSPRTGSSSDAELDTDEIANAAATTERRRRLQQRQRRRLSADDGESQVIAASPSRRQLLTQPLTNPDAGLIPQIDKPM

SEQ ID NO: 169959 - protein, 45 aa, Heterodera glycines
NCTISKWTTNCQPPPSPHYSPWYHSRNIWLKMVVYLKVFGINVTS

SEQ ID NO: 169960 - protein, 191 aa, Heterodera glycines
LDLSINSTVILRDEWLLLGAQEGLFATPMSPQQLRAPFRIAGVSCVYWMELLPEFDMLLAICGSARQLAVIHLQQIHRAFFVAQQPTVSCTNIANIEQCHIAVVSNSEHHRDKRSFPSPSLFVPSSLIHCLFPFQFRLHCHNRRNCRAPIRRQIGLLFSRRSNQNGGAVHLHLLRFGWFRFRGRQFSFCAI

SEQ ID NO: 169961 - protein, 156 aa, Heterodera glycines
QKTEYFSDAKRIIDYVLVYEEKEMTNSNYNNNCDDNKQRDNSRSSPNGTHKNSCFSAPSECPFLSRSSCIGTALTTFHGCQCHRRRGERQRKGRRDGRRRAASAQCFPRKIGSFIQCLAQSADQIGGPLIAFPQNFEFGGDFNRTDGTEINGQFQR

SEQ ID NO: 169962 - protein, 149 aa, Heterodera glycines
MDFTGGNTPNLFEVLLRNFCSESSSIQEKAVSSIPSIEQRFAEVETNEFKAAFGELSGGTLRLVADDRPSTSSEANDQQYKPIEIVIGDDAEIVQQPSSSSSLISSHPETVQDAKVYARIRELREAGLWSATRLPKCEDPPRRKLHWDY

SEQ ID NO: 169963 - protein, 165 aa, Heterodera glycines
SICFSPSPQRFLDTRAFQIWRSWARRVPGRVLFFVADGTVLSARVRAARMPVVVLRGVDDAYPPQKKAFAMLRWMFDNQLSNFHWFLRADDDLYVRTDQLKQFLIGMDPDRAHFIGQAGLGNSLEYGQLSLGAQDNYCMGGPGVLLSRETLRQLGPHLENCLRHL

SEQ ID NO: 169964 - protein, 160 aa, Heterodera glycines
  unsure (1)..(160): unsure at all Xaa locations
MQKRAAVCVLVGDEDPNVKGKINFIQEKDDSPVTIQGEITGLSPGKHGFHVHAFGDLSSGCMSAGPHFNPTNKTHGGPXDETRHVGDLGNVLAGQDGVAKLDFTDKVISLVGPHNIIGRALVVHKLEDDLGRGEGLKKPESMETGNAGPRLACGVIGIAQ

SEQ ID NO: 169965 - protein, 156 aa, Heterodera glycines
MIIKEYRLVLPMTVDEYQIGQLFSVAEASRQETGGGEGVQVLRNEPFEGESLFNGQFSSGQYTHKIYHFDSKVPSLLRAIMPKGSMSVHEHAWNAYPYCKTELTNPDFMKDSFFIRIETIHLNDRGTTENALCLTTDMLSKREVVRIDIANDKEFI

SEQ ID NO: 169966 - protein, 113 aa, Heterodera glycines
EYQIGQLFSVAEASRQETGGGEGVQVLRNEPFEGESLFNGQFSSGQYTHKIYHFDSKVPFLLRAIMPKGSMSVHEHAWNAYPYCKTELTNPDFMKDSFFIRIETIHLNDRGTT

SEQ ID NO: 169967 - protein, 159 aa, Heterodera glycines
MDKDVKPEDPSVSFGFLSEEAREAMLKNCLSGAVDCKAQPFGMIQKRTMVLQHEMDFMRKVRPYQSGEMVQKRVEMVQKLKQKMLEVAGLDEHVQPVNDGTFQHDVLLTEKQSEELIKALNNVPKPAKKLHRYGYGHRFKRASLFLEQFAAQKWPIGQP

SEQ ID NO: 169968 - protein, 158 aa, Heterodera glycines
EGFVDEHHQQQHISTSVHANMQEDGAEVLHHEDTSPTHKNHETATGGEKGGGQGQQHGDGSFGDIMVYQAIHTIEFALGCISHTASYLRLWALSLAHAQLSDVLWSMVLRNGFVQSGYLGAVITYLIFIVFGTLTLSILVLMEGLSAFLHALRLHWVE

SEQ ID NO: 169969 - protein, 168 aa, Heterodera glycines
LIRFSSSSTFLLSLLQIHFQISSSKMRCSLLLPLLFVLLPLLANSCISPPKKECCCQPCCQQPQCRHQRSRIITVTISPSSSSSRNQPLRSLSLHSCDTLVNVPVKMGMPWCKSLSNSLLFLSNSVHWLLNSLIILWQLRARMCKFGERERPTEKECLADLFLRYFIH

SEQ ID NO: 169970 - protein, 212 aa, Heterodera glycines
KEKGQLDGEKWDRAGTIMDFLASLLTQSKSAFISSQNAESWGFVSDYIWTVQQAHFPTHLLPSIVSPGTFIGRTSLPFAHLPKGVPVTVPLGDLQASLLPFLSAGVAALHIGTASQIAFVSQRLAEEMSPKVVLPNSIRRDPFFDDDFLLVAPSLNGGNVFTGLFQQIASWSADLFGFPSDFSPLSFSAAFSLLDRIFNSPNSQPNDGEVPP

SEQ ID NO: 169971 - protein, 165 aa, Heterodera glycines
MSDHPREEKRIFEKIFICNDILLDSLPFCGHAKIGLEFAVVSYRFDVVVDTHLKRRKWKLGSLRIERSSTNDGAEIVKCNSDKTVKRLPIPLKPLPPNLIGFKRIAVYHINRKVIAFLHRIQRLFATDITLELAIFFRQRQSWDVVTYGIWPALNAAGIVKIRFH

SEQ ID NO: 169972 - protein, 161 aa, Heterodera glycines
AYQNNFPIITHRQFGHSSSAASFLLRRIAVLVLLLLPHNDGSPRLPGPPIFEAISHYPSICYLPPESGMCPPATNRTTDTDHIKVAAATVDDSRATVGEGLAEGDDDASQLRHASTPLLTRYYFDAVTAQCYPFGAQTCGGNENRFETKEKCLTKCRIGTD

SEQ ID NO: 169973 - protein, 160 aa, Heterodera glycines
VVTSALDDLQRKARLLENEIDAQLISLNKFNPSDALSSYSYNSNQTKGQGKRAVFDSLTTDIENKLSKLSEINDAMRDCFENDMAEFSKTSVQHIVRRHRDILRDYSTEFTRTTSNIGNQLHREELMAIESESSVNNRCKPTDYLLKEHESISSCDRLLN

SEQ ID NO: 169974 - protein, 153 aa, Heterodera glycines
FSKKLENAKHPMIVVGAQAFQGENSSSLLQKLHQLAEKLRSTSQTKQNTKGNGQPKVLNLLHEFAGHVAAFDLGFRPFNELNSEVKRSIKLLYLLGSDEKPISRKEFHPDVFVIYQGHHGDNGAEVADLVLPGGAYTEKEATWVNMEGRAQRG

SEQ ID NO: 169975 - protein, 160 aa, Heterodera glycines
GKIKLIWPTVAEELQTSAERRRLQRDREQRTKARMAGINRTSTTPDENSKPMELTDKGKTPKLKQQTLSRFFGTMTKNSAPTPVPPMGQQQLQNYTNPKQKQPRKRSSPGSLSTSSSSSIIAISSTSPTAVPDSVSPPFRPLETTGPTNSKATKLHNAEE

SEQ ID NO: 169976 - protein, 185 aa, Heterodera glycines; identical to SEQ ID NO: 162676

SEQ ID NO: 169977 - protein, 120 aa, Heterodera glycines
QKDILKMAADRAAFIDQSQSLNIHIAQPNYAKLSSMHFYAWSLGLKTGMYYLRTRPAVDAVQFTVDKMALRGTIAKDESVEIDVLKDKENISANSELRLPSKRKYNEQLEESDGCLMCSG

SEQ ID NO: 169978 - protein, 150 aa, Heterodera glycines
SKVPSLLRTDSKNRKCTDVMALFSLPRQLALFKRTETIVCDGTFKMAPRGIYQIYRVFGFIAQTHCVPLATALLRGKSRVLYDQFWTRLRQELDKIPGILMISQANFDYESASVNAFCDVFPTVRPKMCAFHVKQAINRRIQSMGFMQLY

SEQ ID NO: 169979 - protein, 115 aa, Heterodera glycines
  unsure (1)..(115): unsure at all Xaa locations
MMEMTILGNRISITADGAKVSPFGSKMDMGDYYVENNKLRKTRGLGWVMAALFVVADMAGGGIVALPTAVVRCQFFSGXLGQCWEILLRRFPVYRTHCRKPYAEIGLKALGPKIR

SEQ ID NO: 169980 - protein, 159 aa, Heterodera glycines
RREKRSIGKRTTKNLGKKRRKDEAVTAPPVTGVVLPSSTTAAADVPPPPCPSETANGQGPSTTTANAKSTTTTASNSNEHQEKEEATAMLLKMQLGTPVPMSHNVCADKPDYAVEKPALEKWSIGIQAFQHQPPASSTGFFKRMHKIVKSVRKNGPAGV

SEQ ID NO: 169981 - protein, 114 aa, Heterodera glycines
DQIQIIEQYSHTIGHQSRLSFGFFLLTIHAPILFAHEEAQQRSIFECFKAVRTAGRTSPPMTSTMSVRILHTMMQATLFGAAAALRLVVLPSLRRCAADTRNPRLRWALATYAS

SEQ ID NO: 169982 - protein, 148 aa, Heterodera glycines
MANSSLSRPFGLCLCSLLLFICAFPPISTQRVNVTLFTESQCPFCTRLLREQIWQFHSRFPGIMNLQVIPFGKGNCEFTRDRRIICKCMHGPTECDLNRLQNCAISYFPRRHIGLVTCIQGLKNLDEAYRRCLSRLSPRTQFRLKQCA

SEQ ID NO: 169983 - protein, 126 aa, Heterodera glycines
  unsure (1)..(126): unsure at all Xaa locations
QETHIVLGIASLCSLLAIIATVVTLASLYSGDXTNWTTKVRDGVEXAFRVNTDLVWNCPNGTSKNPGTPRKRAGETPINPFFXGKVKFPRNXAFGPPKKEKMAPWPPVGPGDTLGTPKXGGGKNSP

SEQ ID NO: 169984 - protein, 212 aa, Heterodera glycines
MAFIGYGALTAALSGIILYANLPTRLTIGAIVPTVEFLAETQLKKLEPGQAVAGPQIKASDLFNAGHPLLVMAVRRPGCAFCRKQASALCSAASTHFADKGVRVVGVVHEQHGVDQFRPFLPCADAIYLDEEKRFFGPSQRWLPLWMGFLRLSTYVNYYKAWKAGFAGNTEGEGRLLRGVYLVNGDNMLFAHLEKQWGDEVKMDKLVDAVSK

SEQ ID NO: 169985 - protein, 160 aa, Heterodera glycines
  unsure (1)..(160): unsure at all Xaa locations
MARQIPSARVSAPACSPSNKRIYSPPFSKRWALPFWAQLAEFGHEFGRILRTMHDANLIHGDLTTANVLVLTQRGPVELALIDFGLAQFSSKPGDKAVDLYVLERAIRSAHIGMGKMMDAILDAYKTEGGGGDEDGTNAKPVLLKLDEVRXQGRKRDMIG

SEQ ID NO: 169986 - protein, 141 aa, Heterodera glycines
MLRYVCLFPRRSFHFSTFLPKDYYKILGLSKTAKESDIKKAYYEMAKKYHPDVNKAKGASEKFQELSEAYEVLGDPKRRAEYDRFGAGGPQPGAASGSPGGPQSARDFGWEFHSGKSAEQVFRDIFRDFDPFGNAGAFGSG

SEQ ID NO: 169987 - protein, 188 aa, Heterodera glycines
VHSILNAQDGVEGRGDCAHGKCGEHLYVPVPLNTLIKKPSTDELRPSKVTLHELCREGDLFIAARGGAGGHGNAFYVSNLVRKPLKAEEGGQGEEMSYDIEMRIMATAGLVGIPNVGKSTLLRAISRAKPKVAAYPFTTLSPSVGMVQYGDFFQLAVADIPGLVQGAHRNEGLGFSFLRHIVRCECVL

SEQ ID NO: 169988 - protein, 143 aa, Heterodera glycines
MLGMMNCQTENYEFYASPPSSSAPQFRSHQQPDDELFNNRKQKKPQITYTDCRRLIDGKMGEASRQEPTKLWNRVIVDNLTARRLRREQSNRKEEEKATEERDERHKDEEEGEEEEKQREGEEKQGEEMEEAMGTSRKQSEKR

SEQ ID NO: 169989 - protein, 141 aa, Heterodera glycines
HNGKDGAPGRDAQSIPAPLEEPCIICPPGPAGPQGPAGPKGPPGPKGSPGEPPKDGVPGEQGMQGQPGPVGRPGREGPRGAPGQPGRLIPVPGPQGPPGPSGPPGEQGPKGQPGPDGQSFEGPPGPPGDAGRPGREGRPGG

SEQ ID NO: 169990 - protein, 118 aa, Heterodera glycines
FLIFLRMTEESVILSFSCLNLPLECSDGCRLVITARSDNDANFVEIGQTETRNGINPKFEARVSLLLRLDKCQQLRIVLYSVDVQSGLLRTLLADAHVLLLALLCAGSKPVAVPLALH

SEQ ID NO: 169991 - protein, 270 aa, Heterodera glycines
MLSLNGTFPPQSLKPLALAFVLDGGIGSQLEELGYPINNSVIWSGEAIIDAPDLLAKCHKKFIDAGADIIETNSYHVSIQKLMESRGFSLGQAESILHKSVLIAREAIAASGRPVALVGAVGPYATYLRDASEYTGAYVKKPDFQEQTIIDYYLLQCRPLIAAGVTTLNFETIPSVKEVECVAKVMDQLDDTVQAWVCCSCQDGKRTRSGDAFADAVKIANGHPKIVAIGINCTAPDHITELLTEAKKANNSKALVVYPYSGQVYNAETR

SEQ ID NO: 169992 - protein, 194 aa, Heterodera glycines
IRHNIMTGVCELSEKHSKVRLHLPLELHCELLSALPFEHAARLLLLSKAIAKNCNSLVQKQKKGWKVFSKNCIDKIMKVYHPLVSPTLKSIEEEHHSLEHSEAHQQDTYLNKRIQDSRAELSFFVGANLVRRLAKYETAGQVMTELLNSVVNMHQFIENFKKRMKEMDERFNEVKRLADRIKSDFLPRDIPSQM

SEQ ID NO: 169993 - protein, 107 aa, Heterodera glycines; identical to SEQ ID NO: 165159

SEQ ID NO: 169994 - protein, 308 aa, Heterodera glycines
VLSVLLHHTRHHLSTVTILFIFNILFSNVLFLASFLCLYSDIALDTKYTRPIANSNEEAEEDSADASAEDEDTTTPQLFIAEILQIHLYKPSEFLKNLIQETLLSLAQNGSLLGLTNLLVLVLVVINRSMSGKGIRISRAKVIAVFAGVWLFLVVSHVLFSALQYFAVSQLHELLELTSSNPSQFACRRSATFMVYNEIGERCDRLAVYQELGHFLLRGHTLFTVVLLSISLVIFVITVYCHRRVQRQHHFLNENATNGKNAGGRSDGGTDSEAGGSTVRRRRDSSPFRRRETLFQTLVLSLIAFFLS

SEQ ID NO: 169995 - protein, 114 aa, Heterodera glycines
EKLCDEFIENGRKLTREYLRKSAKEESAEMFEVFEFVPIDHHGNFDYSLMANLSLPRTSIDSSAGGAFSPNNNPSISNIAINFLADYRPFAYGVPITRDSPSATVISRCKSPFC

SEQ ID NO: 169996 - protein, 167 aa, Heterodera glycines
MSLNNSNLLGKRKVALNERRKIYIQRDYSQALVVKFSTDFPEELEHYIDRDIWLNFVTDLNQIYAEAEKLTAIAYLENILGLVTCHLSMLCFKSLWKRKLEEARALLYETNQQNFVRNGVYVCNPLEKGFRVIEVVLLDEPIPLPAVQDEKNEKNSVPKPIVLQPRQ

SEQ ID NO: 169997 - protein, 196 aa, Heterodera glycines
MAKGSLNETKDTEFEAHNDCFDFGLNPAAQDSVHINRLAMNYWQKQGAIDVWMKFFERAPNRAEMEKFFFSQLDNPLLGKAFKLAIIGEWLAANSLDQGSYTPTNSELLEFWVSKRAPDRLLACEHGVVDYEIEGSKVKTNVLFEAATTAGNLPNIFKDKKCATFEKLQEERFKQEVHEFKQRGSGGGIIGSIGNF

SEQ ID NO: 169998 - protein, 260 aa, Heterodera glycines
PSIYGITDETYQLIFPLIMRKVMEVFQPSAVVLQCGADSLNGDRLGPFNLTLKGHGKCVKFFRDCNLPLMLLGGGGYTPRNVARCWTYETSLAVDIDISDELPYNDYFEYFAPNYRLHIDASNETNHNTEEYLRTVQNSVLENLSNLSHVPSVQMQPIPRDGMQIDESVEHDRANPDRRLPAEVSDHMTAHPGEFYEGENEGEDRRNRQEYKRRGGNTTGEPSDSREDKQDNSKRIKIEKQPKAEQQEDGELLEEDANTN

SEQ ID NO: 169999 - protein, 212 aa, Heterodera glycines
DIVLCSAALLYVVPILELNDADIQRSMDVNAMGTINTIRVFLPEMEARGKGHIVAMGSIASHFGEVFQMAYSPTKFAVRGAMECLRVELRERGLEDILCTTIYPFYVRTPMVTSKGLRPVARWLPFLTVEECAKSVVDAILKEKVNACIPWWLNSFVALNGIFGINMNNVSRDFLDIHFEPSNYEDGQKSFGRIRNSGEIGRKRRQKRGQYK

SEQ ID NO: 170000 - protein, 244 aa, Heterodera glycines
MLMPQRQLRLVSKSLLFVHGAGAKQFLQGLTTKDMDSLNNVPLVYSFLLNVRGRILADFFIYRGNNGGNAEAFVLETEKSQAELLEKTLKLYRLRKQIGIEPLLDKTVLFRFDAEGETTQKQKATIPENSSNWMVDPRVPGFGFRAIRKIENETAHDDEASSSAYLRHRLAWGLAEGTEMVDQIPLNMNGDITGGISFEKGCYIGQELVARTHFTGIVRRRLMPFRPIDDKNGRPDFPRRISAG

SEQ ID NO: 170001 - protein, 39 aa, Heterodera glycines
ALEMIEDLRGAFQQMLVANDWMDSDTREFAMEKAQQMIN

SEQ ID NO: 170002 - protein, 158 aa, Heterodera glycines
QILTQQAQFEEARKQYLEGTRRSPHSIAIWLLLIRLEDSRGRHIKARSQLDIAKTKNSKCDQLWLEGIRMELRAGQKELAQSMLARALQECEHSGRLWAEAIFMEQRHARKTKIVDALKKCEHDPNVLLAGSKLVWAERKTKKARSWFQRTVKVDPDF

SEQ ID NO: 170003 - protein, 176 aa, Heterodera glycines
  unsure (1)..(176): unsure at all Xaa locations
EVVLKVGPEQFTVSKHFLMSVSPVFHKMFSVDMLEKAQGEVSLEETNGEEFGAFLDAISPKMASPNPANVMGMLKLADRFQVDALRNRCEAHLINCVEISLIERLLCADXYRLEKLKNFILKSLNGVGMREFYEENQAALNLLSKDLLIQLTVRICSSSKIDRSALCHNCTKNLNE

SEQ ID NO: 170004 - protein, 130 aa, Heterodera glycines
SKERSGKRVLSIQSHVVSGFVGNKCAVFPLQLHGFEVDAINSVQFSNHTQYPNVKGQRLNERDLAELFDGIRNADLPAKYSHILTGYCGDASFLRQIASIVRECRQHNPKLTYVCDPVMGDNGKYYNGIP

SEQ ID NO: 170005 - protein, 148 aa, Heterodera glycines
MENDQQQSPEDQVSAEAAINLLAVTTTHQHIFGGRNGALFVEIRRIAEQQLEHALAPVDVAGGKWELFVKDGELRMYSRELEVENGIAVDPLKALHVIDGVSAHEFIDLFFRPELKKEWDDTLELGKVVETLSPHTAVIHQIHRRVWP

SEQ ID NO: 170006 - protein, 182 aa, Heterodera glycines
KLELPAVAAALQQWIPRAAGIGTREKKICLTMELEIFKDACGQTALKLVGRHPITVTASAVPDLPTFETIRVSFFDGFVAAFFTERKKQLSRNRIELAIFSQPTDESKNAFKSLWSLFNSQIGAITSVCNASAADRRNAKNTSIYDLDPYFDTVPDWLVAPTLRRVDGVFGLETIYKWIHND

SEQ ID NO: 170007 - protein, 126 aa, Heterodera glycines
MDSQQCPMKETDEHRQMRRIAFVAVVVSTVAVIASVVTLPMLYNYVQSFQSHLMVETDYCKARARDMWLEMTALQIGKGHVNRIKRGWLFGQWVPESGADAYAAGGGPSGGAPSGGAPSSASAPVG

SEQ ID NO: 170008 - protein, 93 aa, Heterodera glycines; identical to SEQ ID NO: 167010

SEQ ID NO: 170009 - protein, 176 aa, Heterodera glycines
QVTRGQVCNGGAQSQQNQFRITEKPPAHQAPQCASQGCFNENICCQLWGLAGECRRNPTWMNCFCKVSCGKCIPQDYVFGSCTDYHPRCWEWAEEGECRNNAWMSENCKQSCGTCVSQYELKQMCRRGGRGKRQISMLLEGAAGSPPGGHSEDQKDSLGPPKTAASGAKEFISGQK

SEQ ID NO: 170010 - protein, 156 aa, Heterodera glycines
EKTQEALSKGDFRTAIQLQPMLKFNGGGHINHSIFWTVLAKDGGEPSGDLLKTIERDFGSVQKMQEKVSTKAVGVQGSGWSCLGYNKELKRLQVAACMNQDPLEETTGLIPLFGIDVWEHAYYLQYKNVRPDYIKAVWTVVNWKNVEERFMNALNE

SEQ ID NO: 170011 - protein, 143 aa, Heterodera glycines
MQQLSDRRIQFLLYIDKKFVKSHAILKLNEKKYGLLTQHVTFEVASKARAMTLSNVLNKMNMKLFGFNYMPMFPQASKSKFNMDGGDVLVIGVDTSRPPKATPFEKFMLRKKGVEGLISEDPLIVGICANYLKNPYKFCGDYY

SEQ ID NO: 170012 - protein, 219 aa, Heterodera glycines
MAQSAEKIVFVLGADGDDENGDGSEIKPVKTLLQALRLSHGTSEVDFLRVSVSSKEGQKQWEKPSKSAMKKAISRLEEERRKREKATNSAAAKLTEEAKSVAEQQQEMAREKRLEEAKKMQVKLDESLPEAKRTKIRECPALCGQRVKVFAFVHRMRQQRKNLMFLVLRDGSGFLQCVLNGTLCQTFEALTLTTESSVCVFGQINKLPIGKVAPGGIEL

SEQ ID NO: 170013 - protein, 120 aa, Heterodera glycines; identical to SEQ ID NO: 162626

SEQ ID NO: 170014 - protein, 210 aa, Heterodera glycines
EMSQMNSKVRDGVEAFRVNTDSAWTDLMDVQVVVTPPSKPRDNPFNSIFRAKRQLPGHCQCAGLQQPSCPPGPPGPSGPPGLFGQPGGAGQPGQPGQPGQPAPPCPPQNIPCPRCPAGPPGRPGGQGPPGQQGAPGQPGTPAQGGGPGTPGAPGPQGQPGQPGRPGAAGQPGQPGANGVVSRPIPGPKGPPGAPGQNGNPGSQGQPGQPG

SEQ ID NO: 170015 - protein, 96 aa, Heterodera glycines; identical to SEQ ID NO: 165128

SEQ ID NO: 170016 - protein, 118 aa, Heterodera glycines
MHQMHQSCYAGVAGPNGGPLRPSVSLSVVHESSALGSDGESIEVSPCTSDQSAGGGDGNLGEGRQTTKTEYIPKVKLRQKPNRRWSEQDIQKRLSLPPDIRLPQNVIDKLNRTPTLDN

SEQ ID NO: 170017 - protein, 204 aa, Heterodera glycines
  unsure (1)..(204): unsure at all Xaa locations
MLFSPSTVLLLLLIVLPFSLSFILIPQNVRQISPALSSRPFRRFGHFSVIAKRNPIVLIPGDGGSRLKANLTGKPSVVHYFCQRQTNDFFALWLDLQQFGPFVIDCWADNMRLNFNRTSGRAQDLEGVKVRVXGFGHTRTVEWIDSSKRVAEXGYFAPIVASLAKLGYQRGIDVIGAPYDWRRAPEELLHYFVKLRSLIEQLYH

SEQ ID NO: 170018 - protein, 254 aa, Heterodera glycines
INDRPYHCRYCPKRFTQKSHLDQHERIHTGLKPFTCQYCGRQFRQRSQQLGHEATHMNRERHSMGSMAMSAAVLGGLVGAAGGYGDAALCGTARERTTHLALKQPQQQQQEMAQAAAAQLTADEQRRQQQQQQSSSPTRPLGLGRPTVAGGVGGNGTRHFQRSQQQQMHQQQTNMDQCCAGDNTSPMAHAQQQHQMNSFNGLLRAVQSNDSAAVDGLLGLRGSMAMKQQQQQHGHSGMELNEQLQLVSAQLMNR

SEQ ID NO: 170019 - protein, 80 aa, Heterodera glycines; identical to SEQ ID NO: 162554

SEQ ID NO: 170020 - protein, 62 aa, Heterodera glycines; identical to SEQ ID NO: 163764

SEQ ID NO: 170021 - protein, 159 aa, Heterodera glycines
HSSVDKGIMLSGVKMRKLPTNREKGGNFVLRAEVLEAAIKEDKANGLTPFILVVTVGTTNTCAVESCRELGPICNREGIWMHVDAAYAGSFFICDEFRHLSDGVELADSFNFNAHKALMINFDCSPMWFKNGDEAIAFFNVDPVYLKHEHQRDAYDFRH

SEQ ID NO: 170022 - protein, 128 aa, Heterodera glycines; identical to SEQ ID NO: 162609

SEQ ID NO: 170023 - protein, 150 aa, Heterodera glycines
MSSISPANPKKFSIPSETNCVVCVDIATGNHYSVASCNGCKTFFRRAIVNNRSFICMGNGNCPIDKGVRCACRACRLEKCLQVGMDPNAIQSERDRIGYTKRTRREKLVGFDEGIGHERGDLCAESFASNDADLEESDEDDVIFRDTEPI

SEQ ID NO: 170024 - protein, 116 aa, Heterodera glycines
MSILQKLSPVNIDSKGVFKYILIKASDGAIERFLVRGYGRCKFHADILEEVQASEGEKAIEFSCVGGGRIKHEPEAKRIFVYGYSQGFGRADHAKSVEILRERYPNYTIEWSNEGY

SEQ ID NO: 170025 - protein, 151 aa, Heterodera glycines
MSSNLMGSPSCFFHPTAEQAAAAEEVDKYEVFSWHGDLSDQLAAQFLVTDQQLLKECREKLANSELRETKLLSKNGELNAENKALKAELEKQKMMTEHSQIKAKVEKMEQENQQQLDKKYVSFDVFNALVERIKRLENQQLKQNKEEGKKV

SEQ ID NO: 170026 - protein, 39 aa, Heterodera glycines
SLKILILVNYLRFLNFLKFCSLIFSEGCVLRSAPILIDF

SEQ ID NO: 170027 - protein, 161 aa, Heterodera glycines
RLSPLLFLSVLTFSVRSLRILQIVPGFTNSHVLFNYRLAQTLADMGHSVTLWTQMEMAMVFAGDLKLPEGVIEHRVPIHFRDRLKVEGLKVFQEMIFARGTPYELWWTGREFQEMRLEACEQMLNEADALRQKWAKFDLAIGHFHDLCPVMLAERVGVKRV

SEQ ID NO: 170028 - protein, 77 aa, Heterodera glycines
INFFPSSPKRSIGKVRLCSNSLNKNASSYIFRFSANSAGASALHFLKKMTKKSYFSKLKSLLNREETEDRLDFCSNK

SEQ ID NO: 170029 - protein, 89 aa, Heterodera glycines
NHANFVGFVVKLCPKFAFKPVPVMFMFDYSPIAPFFTSAYCFSNHFRCASLIIDGNFIYFFFSFFSSNFCHFSFRAALCLYRAVLHVLT

SEQ ID NO: 170030 - protein, 270 aa, Heterodera glycines
MVASSFSNNGKNILESPFKLTGECKLLYYCTNELGHFLNQTSNALIGNPLRIVPFDGLSSPQKQVCTNTSNSLEFNCTERYISLTNGTALWIYDLQKGSTLRELHDHDGNISGVAWHRQSPWLLASVGDDCTLRLWDLRSHPAQIAIRRATKPYRRLEFSPDCNYIACAGELVSIYDLCMAQNVVHMLSCSSSSAVRFNPSECLLATADDDRTVRFWDVDTGECVTQTPIFNAKIGQIHFEPNGKYLIAVTEKQMASIRWEPFELVSQFD

SEQ ID NO: 170031 - protein, 132 aa, Heterodera glycines
SVQGGQSTGEQRRGGKIFLGLAQDAPHVQRVFEADQKRRLYIRRSVSSSTSTARRCCNTTAATALCAAAVVLLPADPTAAERWQHSIVTVWRALPTANAVPRRRNGAMDATPEPIAATVRRLPTEFVLTNEQ

SEQ ID NO: 170032 - protein, 95 aa, Heterodera glycines
SVSLVLGHQVMNNNDMQLLMNRFKEASQRGSNDEVERFFSDLRKTPHMFNAFLKLTKKQGVCISGDPFPHQHQPQGGAATQPQQQHFVQPQSSFY

SEQ ID NO: 170033 - protein, 322 aa, Heterodera glycines
MFVALPNCSSPRNPLATYPDCIASLDINPDSQTYGKLISVLEMPNEGDELNNLCCCSSDRLIVTSIGSGRIYVVDTSDPKELKLEKTIEPSTLTSLGVSCPGRVCCASDSVIVGTMGDDRMENNGNFLLLDRLTFEPIGFWAEKEGQKGTKFGGTDFCIQTKQNVLLSVGWGTPAKFRGGLRPRDVTNGHYSNEVNVWEWRQRRLIQTIALEGDCGWMPMAVRFLHNADKCHAFVCTLLGSAIYHLWREEGEESFRHCLAAHIPPKKVDGWQCPSFVPQFVQDLLVSMNWALPKMPAFISDLVISSDDRFLFSSNWLHGDVR

SEQ ID NO: 170034 - protein, 49 aa, Heterodera glycines
NTSSSTSATDSSPDGGNYIKEEMLQREVKLFQIISKILTLYKSTMGITG

SEQ ID NO: 170035 - protein, 163 aa, Heterodera glycines
RRLNFNPYNRPFNMRNSGTKRRRAVQQQRHHHLVKRWNFAINARTDTLETCPDAFHRRATDGNDSAQFASHQRHPPTRKKVYLKSSRLPFLNHRQQLATDAPPLQNGLSSIAAAVLSSIESVANERDFMCEWLMQSEGDDDWSDEEGTAAGPIEPCARCAGGI

SEQ ID NO: 170036 - protein, 59 aa, Heterodera glycines
EVPKVDCLKGVDGIVAEKGDDNGDEEDDCNGCSSTEREEEEEEVHGEEAEGNDGIGILL

SEQ ID NO: 170037 - protein, 298 aa, Heterodera glycines
  unsure (1)..(298): unsure at all Xaa locations
MEADFHAPWFYGSLSREKTEKCLQSCADGTFLIRNSTNYPGDFTLCVACNLRVEHYRIYMVNDHFTCDKEELFDTLTQLVSXSHYKRDADGLCHRLVCPYISEECQRQRTHIDLVLVEERKKEFEQAALLLSVDHLRLGTVIGHGEFGDVLSGTYRGRKVAVKTLNIGMVQDLLAEARFMIGLHHEKLVFLVGVVIEDPRESEVYMLTEFMANGNLVDFLRSRGRHHVDRPRLVQFAQDVAEGMAFLESRNFVHRDLAARNVLLDDRLGAHIGDLRTPSIGQSARKKSRGKGKFPDQW

SEQ ID NO: 170038 - protein, 143 aa, Heterodera glycines
AKPTELEEISSDLSTVPTQIHVSIPENLMNFDGTELIDLPIDKCVIVYHCGISYGIEPELWKAKTMEKIDGDQIKQTQEMDTKQLEDYVTVYHHGWYGRFEDEQQQQLIDEEEEQKRQFDKSETDRIALSVEQKKEQLAAVDH

SEQ ID NO: 170039 - protein, 141 aa, Heterodera glycines
MSSTIAPVSSADGTAGSAAAVASAGPSSVEPMPPVEQLMEGIEEKCPPSLDQRLNAMDEVDMRIDDLLTVVAEVMAGLDKDKPLSKAKMEELYKKYELKLDEIQRGIAEQLTYMEQVCVGAEHQGSTYHYHQVAQLSAARL

SEQ ID NO: 170040 - protein, 89 aa, Heterodera glycines
CGYCKFTKRAHDKAKFGLWAHRLTVHHYQWLANLGWRRSGRFLYKPLMGRTCCPQYTITLDVHKFLLSHTQKRVLRTMRDFLRTDQRPK

SEQ ID NO: 170041 - protein, 170 aa, Heterodera glycines
MAPKCLPLELLFEIVPFIPAEKAVPNALSSCRLLHKLFLPRVIKWKEQLLTDLMSFSAIVNNLSAKVDNLSGVINNHSVKLDNLSGVVNNLSGVVNNLSGVLNNLSGKVDNHSVKLETIEKKMVETTGKAPNETKEAGNGHKAVMGAFHQKNGTIRRALTRNTNVGKGEW

SEQ ID NO: 170042 - protein, 56 aa, Heterodera glycines
RESILNFWGKIVTPQKIYIIKIHFLTSILCHRSPSVRPLVIVFKEIECNLFFVKNF

SEQ ID NO: 170043 - protein, 162 aa, Heterodera glycines
  unsure (1)..(162): unsure at all Xaa locations
HHITAIKKFHCQLNVLTKLNCITRLSLWLKDQIILFISFPKYHYYLYSCGFLGRKSSFSFFTRFVKLXCYTPKVYDDQDVLCSSVRMSVWWCLCSLWSPSPFMCIKELPQMNGQHQKWSWYLSYGSVLLFGAHHWLLAFKWWMDTIWICTFGWSWAQKCGPA

SEQ ID NO: 170044 - protein, 65 aa, Heterodera glycines
VILIFLLLSPYFLYGNNSSAISPNKSAACSNSFRIFTIFSSVPLAADVPCPVLSILLIGLTSWCR

SEQ ID NO: 170045 - protein, 164 aa, Heterodera glycines
WSSPRWRPLFIVDARAAGFRHEATSQKMFFHSPLPRTPVLRRSTLSGSGQVEIGAALRHQLAEVFTPPSNIYQVAPQREQSVDDSGGPSAAETVPLIEHQLLMAYQDQLNNNIVQQQNLYQQHQHNFVAPSILVSSSSMEKSASAQDLAGTAAALIRRHRSASK

SEQ ID NO: 170046 - protein, 36 aa, Heterodera glycines
NFLKYKPKLFGLFKKELKIFKNFIHLPFDRKSIREP

SEQ ID NO: 170047 - protein, 129 aa, Heterodera glycines
NKAAVERTELRGFAPLVDSFEAIYARNCYMRVRDVFERPIGGVPGAKVKLVDRQTDDFCWTFKFPGSQTEVINVSSYNYLGFAQSDGPCAEMAAKAVEKGGLSTCGSALEGGQCSIQSDLEKLVAKFLG

SEQ ID NO: 170048 - protein, 125 aa, Heterodera glycines
MDYGLGRIRRRRSNYGAMSPTKSVQEVQPVALSWHGLTAVHAKSGRKILDNVSGMADAGQLVALMGASGAGKTTLLNTLLNRNLKSLSVEGQVLVNGHSLGRSITYVSGYVQQDDLFMGTLTVKE

SEQ ID NO: 170049 - protein, 181 aa, Heterodera glycines
QFSQNASRNLLAPQFPCSTSQFSNVAHYHPSFNPTIASNIYINPSVFNTSHDQSFVLINQLQHLSSKSSQNWHLMVDDFVKKTISVPPRNYPKNRSPSSDSSFPVSHPSTRSNSRNSRKTSPPTRKRRLKHNISQGKRTQRQTKEAHLSKQTMECAKAIGLDSDYLRKIEEQKKLREEIAR

SEQ ID NO: 170050 - protein, 103 aa, Heterodera glycines
MNFACCCHFSRVAQRYFSSSRKQTEQYLERQANDQYSRRAREHSYRARSAFKLMQINDKMHFIRPGTNNNCESANARLKHSLQDSLRLTRVQRPARGAKCSAS

SEQ ID NO: 170051 - protein, 35 aa, Heterodera glycines
FIDTTSKTSLTQFILTKFSKNIKLSFFGQKLLKRT

SEQ ID NO: 170052 - protein, 139 aa, Heterodera glycines
SSLPAERRKQSETDRGRQQSAKSSPTREMAPFFSVFYRGISGISRVTKSQSRSDLLEKDGEREGDKAKAKTTQTHGESRNCTTADKPPHPLTKAKGNCATDGHGVWDKANKKGGIRSKSTADLHAAKAAAAAEGKNWRE

SEQ ID NO: 170053 - protein, 142 aa, Heterodera glycines
SAMVPVKSAKEYDRQLDVAVLFSECLTRAIKMGYITKEQIDDCDPNVIISLPRLAIVWGLLFYPGGALNVNVPKEDISEMFRHFHKVLILVRNLLQTLEPSELSKLEQKLVGEHDGLGESCSSVRALEQQIEPFSGRSLNRH

SEQ ID NO: 170054 - protein, 216 aa, Heterodera glycines
MDGELNQGTDPKIVHRDVIEMFPELDLTQIVSEFGHLSPEGLAGIVIDRMALIPRKKNGTLKRKADNESNDEVLSEYSGGSETAEQLGNLLVDKMLGEMLRSCKVELRSKRAVVDSSAWTGVKTLMIEHFPMVRADFVTKMVRHFEGAIVPTAIACFFVENSFGDKLQKIAPSFNQSFWYKMAIPIQCRGRRLKQAYVSEQLREHFKLYNELMCQY

SEQ ID NO: 170055 - protein, 326 aa, Heterodera glycines
  unsure (1)..(326): unsure at all Xaa locations
MKPLKIDVDFPSNSHPTSQELNQDCIPLYEMLEFEELQFPNYYLSEQLGRGAHATVMPCHFHGKPAAAKLFNANVDFKTIQKEAKLLHEFRHENIIELYALFHGTMSGLVLELMEGGSLSELIHQRKSIVYQNCHVINWTFQVAKALEYLHKLSFIHRDVKPSNMLLSLDYVVLKLCDFGTIAKHRTDMTSTCGTAAWMAPEVFRGESYDFRCDVFSLGSLSXEMLAPSPPFADAPELNSLAVLWEVAESGLRPPPIEGVAEPLQQLMVRCWADEPNDRPPIDEVKEMLEALLKQLPHGALSPFVGRLLTGRPSPVDFSPQARTND

SEQ ID NO: 170056 - protein, 175 aa, Heterodera glycines; identical to SEQ ID NO: 165037

SEQ ID NO: 170057 - protein, 154 aa, Heterodera glycines
MNWLICDSAAKKSGNVRKGDVLLRVNEVDLQNSTHAQAAQTLKAIPNYSEVQLVLQHLPQEYQRFEEKLERARAEMAQLQQNPQQPPYLPPDAMPPPQQIMPMPIRQDFYVRALFDNDPSRGDAVLPHRSLAFRYGDILHVTSVGDDDWWTARR

SEQ ID NO: 170058 - protein, 198 aa, Heterodera glycines
NGFSFTRPRYVDHLLQSGCVLFRAFVSRRWPRFDAGVKDHRMYCILLQANITGIVQYTDETNVSRSSNFTVPNGGSTKIAYPGSAKLPSHCGQHQQQMTIEFVPDGFNHTELEADNTWYLTLQFNRTGTKEQGTFLLANYTLDVRFFNVQNASSHYNGTYLYAKAPSFKPEWSATVQNGQPNILTCSKNGLHLDEKSS

SEQ ID NO: 170059 - protein, 88 aa, Heterodera glycines; identical to SEQ ID NO: 164225

SEQ ID NO: 170060 - protein, 153 aa, Heterodera glycines
MLLLASLRGPCRRPRVLKTLRSLKVPHFSTMNRDYVIETVNFTSERDSVFKFLQEVFLVNEPITRVIGCTPSDTSPIFDDICEKCSKFDLSFAAKNNDGKILGVLLNAPFKLENIHESYRDIGRMPNKKEFGEEIRNGPFPSQNANRIHAILT

SEQ ID NO: 170061 - protein, 160 aa, Heterodera glycines
MFLFLPPSLPSRLCLPFLFLLFYAYFGDGFRRRWRDDSFINRTFKPRRYKLTLSIRNHNVTDVRFFRLIGVDNTADFYVAPGDTFTNTYTVNRKGAWVLFVEFPGNRYAKSQRKMISRDSFPQWMMEVYLFPPDNVGFSEWYKIRRTKKRKRTQRKPKMT

SEQ ID NO: 170062 - protein, 147 aa, Heterodera glycines; identical to SEQ ID NO: 165030

SEQ ID NO: 170063 - protein, 51 aa, Heterodera glycines
PGPSCPVKAPRLVRSILKTAFALASGARNEINSKTEEIVFHSLIIGSNTHP

SEQ ID NO: 170064 - protein, 38 aa, Heterodera glycines
IKLFIIIKQKLKHNKKQIRKESPEIEKEGKKWVFIVQH

SEQ ID NO: 170065 - protein, 211 aa, Heterodera glycines; identical to SEQ ID NO: 162556

SEQ ID NO: 170066 - protein, 158 aa, Heterodera glycines
NATQWIRAELENSWPLEIIRHVKIGIKNPVTDPYSYNYTANLIDDIVSPRGPFGYVSQILVTNDFDRIENFWQRCPASYCAVVKGYKGINFSLFRHKVGHLTRAHKAERWFERNRDKMYDIILKNDKTSDLGTLMRAIEMEIGPVTSPDLFHSYVIAH

SEQ ID NO: 170067 - protein, 160 aa, Heterodera glycines
SLCRVMSGTLRIGDQLNVLRHSASSEDVWHSVKIGTLFLLMGRELLPVECVPAGRICGVEVSDGRWIGGQTLCSRALAVTEVPRMSWHQKFAEPLVRVTVRPTNAGMAEMEELRSALRQLSVLDSAVRVIEQEDGDLAMLTAGEVHLQKCLEDLKLLGQT

SEQ ID NO: 170068 - protein, 104 aa, Heterodera glycines; identical to SEQ ID NO: 162620

SEQ ID NO: 170069 - protein, 200 aa, Heterodera glycines
MRSARVNQRQQIEELAQNSALLQDMTILPHNYNFEIPKTIWKIRTIDAKIVALQFPEGLTMFACVIVDILEKHTGAEFIILGDVTYGACCVDDFTARALGCQLLVHYGHSCLVPIQDTVGIHLLYVFVNIDMGTAHLLDTLRHNFLPTAGDGMEKVPKLALVSTVQFVATLQIVKRELAKDGFDIVIPQCSPMSTGELLG

SEQ ID NO: 170070 - protein, 104 aa, Heterodera glycines
LFNTLIKSPCFNEHECCAKWAADGQCESNSEYMSQFCKASCKKCQYSYNMQEECADRHKNCKALSYQMKCDSSWMAENCRKYCNKCNVKRMQTCAGGSPGGEKR

SEQ ID NO: 170071 - protein, 123 aa, Heterodera glycines; identical to SEQ ID NO: 162616

SEQ ID NO: 170072 - protein, 188 aa, Heterodera glycines
MSMSKSSYTYNRKTFEDAEFPILCETCLGPNPYLRMSKDTHGGECKICERPFTTFRWMPGRGARYKKTEICQTCAKLKNVCQTCLLDLEYGLPVQVRDTALQVKETVPKVGANRDYFIQNVDRALEQTDGTVPYGELAKLTDAGTNEMLRKLARNQPYYNRNLPHICSFFVKGECTRGEECPYRHEKP

SEQ ID NO: 170073 - protein, 116 aa, Heterodera glycines; identical to SEQ ID NO: 163734

SEQ ID NO: 170074 - protein, 217 aa, Heterodera glycines
SLFTMYSNISSSGWVSSDHPQQQIGNFYSYDADPTLSPNGGGYNAYFDYPNQQPAASSSNSNFVPLGSGRPFPHTISQHAQLSFSDNSNANFVPLGSGHFLPERDGDVVCYEDSFEMQKIGRKRRRGRKSGRRARMDIYGAGQPATHDFGEIVNYDDWQQWDNGWGGQQQFEQNEAASNYGQYGIEPSQNYEDYEIYYDNYETDQTKELWQEELEQQ

SEQ ID NO: 170075 - protein, 156 aa, Heterodera glycines
MVLQKKKKSFSGFKIQNFVYGLDSQISSLDKYLLNFKAKKNGGSCLLSGRTNTGKTLVLESLIQKHFSDDDCDINIRRVDGLSKMTKLFEKLDLEGPVLIVVDHFELFAYKQQQNFLYSILNGSQTLPWFVVLIGTTENSVNLLEKRVKSRFSALR

SEQ ID NO: 170076 - protein, 163 aa, Heterodera glycines; identical to SEQ ID NO: 165000
  unsure (1)..(163): unsure at all Xaa locations

SEQ ID NO: 170077 - protein, 158 aa, Heterodera glycines
VLLLNFAFIFFAFLSSIYAEEEDPKVTHKAFFDISIGGVKKGRIVIGLFGEVVPKTAKNFLELAKGTHGYGYKDSKFHRVIRNFMIQGGDFTRGDGTGGKSIFEGKSFEDENFKLHHYGAGWLSMANAGPDTNGSQFFITTVHTPWLDGRHVVFGKVL

SEQ ID NO: 170078 - protein, 50 aa, Heterodera glycines
RLVASKKGRIVIGLFGEVVPKTAKNFLELAKGTHGYGYKDSKFHRVIRNF

SEQ ID NO: 170079 - protein, 66 aa, Heterodera glycines; identical to SEQ ID NO: 133131

SEQ ID NO: 170080 - protein, 118 aa, Heterodera glycines
LAAVAALAHLNPPGCRYQNEAETPGPPGPSTETPGPQSSTSTPSEGPGTPSTETPGPPGPSTETPGPPGPSTETPGPPGPSTETPGPPGPSTETPGPPGPSFFLSGPPGPSTETPGPE

SEQ ID NO: 170081 - protein, 162 aa, Heterodera glycines
EVILAAETVYDCVHSCYQQNCSRAAFTHFPRSVCLMHFGGEVPLDQKCAEVDRLGTTWDFSSVPEVVEIKCVKCAGRKESVEKSTDNEQNIAKRHFSNDENAVGQQETTARHILNPQGLTLKCDGRVEFVASPVANLHPLNITNDVPADTAADCARKCFEAI

SEQ ID NO: 170082 - protein, 91 aa, Heterodera glycines
RRFRIRLIFENSPSSGVEVLATFCCSSSSVLNSLLSVFFVAFSTVPSFVFLTEFSDEMINCVVGSDALEDDATSWVFSHPSDARMSPSSGR

SEQ ID NO: 170083 - protein, 169 aa, Heterodera glycines
LSSAVTHSLPTHPSTPHKIICPLLGDIRASDGTQEAASSSSASDPTTQLIISSLNSVRKTNEGTVENATKKTDNKELSTDEDEQQNVASTSTPEDGEFSKISRIRKRRYSQARIQPTRVKKVMQSDEDIGRMVASVPVAIGSAMEVFAEKLLLAAAESVQHSSTKTLSP

SEQ ID NO: 170084 - protein, 91 aa, Heterodera glycines; identical to SEQ ID NO: 164990

SEQ ID NO: 170085 - protein, 66 aa, Heterodera glycines
ATTQGIRLTKPQRGRIKVRHERWINPKSIKATAFPPKPLPKGRHLKLIKLFFNDYNLLGNVRFSPL

SEQ ID NO: 170086 - protein, 120 aa, Heterodera glycines
DFEFAAWQMLYLLVNPQKVYRNFMYRKKAKDQWARDDPAFLLLLALSLLGSSVLFALALNLSFSSFCAFFLWVVFIDCIGIGIAIATALWFISNRFLRRTRDCDVVEWAYCFDVHLNAFF

SEQ ID NO: 170087 - protein, 88 aa, Heterodera glycines
LLQLPKKSVRRQLLHFFSLHFTNKIIHRSIFRIYSLNISTKFTHPQNAPQLAPHSCNKFVRNLLIQPAVRSRENYILEKMLLSFHKKM

SEQ ID NO: 170088 - protein, 89 aa, Heterodera glycines
IGLENYFLCRCFIYLFLYFKLLLLHFPPFYSHTQVFSIQCVSDSAANSVNTTANNVTDIQRGCAINGTAGTIAGAASCRCALPTRASRK

SEQ ID NO: 170089 - protein, 152 aa, Heterodera glycines
VAGLKRHLWRQRQIFFIARRCPSSFHLTSALIDGVPLKLVFHCVYFPFDKCQAVLDKCEAVPYFISKLVDLSEHFISKLFYHFFHCLFPFDDTWQQKVVQQLTGREHIRDGIFGRDERHNFEQQFERKAFGGHCWEKQTVLLFGVISEQLAD

SEQ ID NO: 170090 - protein, 152 aa, Heterodera glycines
MVTNAQNRPKVFIVGVGMTKFYKPKSSGKDYPELVREAATEALEDAGLKYDQIEQATASYMYGGSCCGQRALYEMGLTGIPIFNLNNACASGSSGIFLCKQIIESGNVDLMLAVGFEKMNPGSLEATQGMEGDRALPVDKHIQLMADTYGLQ

SEQ ID NO: 170091 - protein, 147 aa, Heterodera glycines
GNTYSRRTTSLLLLLTILMGVSMQKPTIPQKIIEKARRIKMGKKVVITPYFPKPKSCDGPGTRTEFQTKFLFFNRTLGLLHHFPKFIQDPETRAVGKAVKRILVFEKVRKKYKYRLYCSGSICVSAFHSFDHSLFSIEFTFSSIFNT

SEQ ID NO: 170092 - protein, 117 aa, Heterodera glycines
YPNLLLGCVECFPNRQQRLAAGRTAEDLYERTVRRLWELEHQHGCELHTVWACEWKERLRRDPALRGRYEHVFVPRPLDPRSDALRGGRTEPFKLHHVCAEGEEILCIDVVSLYPYV

SEQ ID NO: 170093 - protein, 109 aa, Heterodera glycines
TNYICTNASILAHQTNKVEPHKVFRHHAVRVTVECIVCQKSAPQTYEFSGSGKHAKFVLLQEAMDIATSKIAAINPTRLGLALNFSVFNFEILKSVDEARKLAQKVGPI

SEQ ID NO: 170094 - protein, 247 aa, Heterodera glycines
MKHGAKLDAIVTDLVLQPMEEKMETAEAEVRHQTEDIAVASSTCEPELSVHAQFLLTDTLNGLKRTLDDMAQEHKHPIHHLISRCGKAIDTRFFSDLSRLLKNEKEIETDSDNLRHANRLILEHLMGLGRTEVADVFLQESAMSSLEVPDIDNFETLRNIMDSFKRQDYLPTIQWMKANRGEDNDRHDLLFRLQCQHVIRLLETNGKRQALGYVKEMQDEEKEKYKEELKHLMFVVMTHPQKGPHDY

SEQ ID NO: 170095 - protein, 97 aa, Heterodera glycines
IIHLCSRHYLIFNCDRIQTYNKNRRAKNPKLNTIVISVARINKNGSSKIIRISIIMDGKTIKFIADSGSDINIIDEIAYKCIGSPTLGKSDEEGIFF

SEQ ID NO: 170096 - protein, 79 aa, Heterodera glycines; identical to SEQ ID NO: 164974

SEQ ID NO: 170097 - protein, 159 aa, Heterodera glycines
KSGMDVWADIAKADFMDERFSRVITANKAYNLFQNSIAELDERSFRAQAAILNGLLTHHLDFIHGKCVDLRKIGLLLDHFDRLVLRSECLLAQNANISLLRCLVKCSFYCRFADFLLCSSIYQQSFNEFRLLAMAMFCYGLALKWACHKSVKGSDGADS

SEQ ID NO: 170098 - protein, 158 aa, Heterodera glycines
  unsure (1)..(158): unsure at all Xaa locations
VIEKQSDPLPISRNTSVAIVLSYDLMVSKAKQLKSNSIYVVVFDECHLLKEQTTQRTKVAFELSKIANRVILLSGTPALSRPSELFTQVRMIDPKIFPSWVKYAVRYCGGKKGRFGFEAKGRCALCXNPDELKTVMDKIMIRRLKKDVLDDLPEKRRE

SEQ ID NO: 170099 - protein, 39 aa, Heterodera glycines
FSYIIDYLKYIYFYVGFEPELQKCEFRCKLIRQRNSGVY

SEQ ID NO: 170100 - protein, 80 aa, Heterodera glycines; identical to SEQ ID NO: 164083

SEQ ID NO: 170101 - protein, 41 aa, Heterodera glycines
ILLSFNAPKCFLFFYKIYFIKFVTLGIFVSVFEWDAENAIE

SEQ ID NO: 170102 - protein, 96 aa, Heterodera glycines
KRVMANTFPSFAFTYFFVELPTTSSIVWLIHCLFNRGLRLLLLLLFCQCSSSSCSSPVAAPNRRMPTAVFHCAALPVRRKMPQCTAARSLLLERSG

SEQ ID NO: 170103 - protein, 160 aa, Heterodera glycines
SGTVCADCGASCPSWASLNHGVLICSDCCFVHRNLGRHFSQVRSLTKGVWHDKQLALLQLLCRNGANNVWEHSLIDSLGGAGRAKKKPVSNDPIIPKKEAFITAKYAQLAFAIRPAKDEFNVDDLNRQLWSCVRTAHVETALRLLALGACPNYADTEKGN

SEQ ID NO: 170104 - protein, 152 aa, Heterodera glycines
MFICGGSRLLGNWRPEKALEMARETEDGEENQSQQKTNSGRNQSSSSVWRASIELGPEDSQRLLRFRFFLGFPLQIDPSNCQSSLSLLVVRWEAKMSPRCILPSIESNSMGECNKGVTSEFGSYGGRDRLIMDGWLHGREQRQIFLRMFGTA

SEQ ID NO: 170105 - protein, 58 aa, Heterodera glycines
MGICQSIEEKAMDLKTKQIDRELIQEHLDAQKIVKLLLLGAGECGKSTILKQMRLFFK

SEQ ID NO: 170106 - protein, 56 aa, Heterodera glycines
SIQFLLIISMDVQLNFLQHEPTANWLDYFLERKKLSELLRRNPIGLTLLHFTLIWL

SEQ ID NO: 170107 - protein, 155 aa, Heterodera glycines
KKIMEQLDSTLNAAKNETERLAEQLKKSAEQAQKEVRERTLHQDPYLRLVYQLQTAHLIALGIEVLTLYLGWRDVNFVWLLLPLLFCAGAIWIVSQRWYHQMDGRSDFNKVLSADKMPVRAKAASCLVGGFVLSLLAQWTAPTMGSTSIGLLFSL

SEQ ID NO: 170108 - protein, 146 aa, Heterodera glycines; identical to SEQ ID NO: 162568

SEQ ID NO: 170109 - protein, 152 aa, Heterodera glycines
IDETIKFPVFHCCNGSHQESFHQSFGQKAPNEPLKKRDSSVELLNDNNSFFKIRDSSAEFHNDVKLLGVGGQSHQGPFHEFIDDDFLFEKAEQHPPIVVANPSAPNGPFKIRDSSAEFHNDVNLLGVGGQKDVFRKLKDVFGFSYFRFKQKP

SEQ ID NO: 170110 - protein, 118 aa, Heterodera glycines
MSDIAGASSSAFSADASSTKKKGDFLFLAELGEGSYSTVYLASERQTSRKFAVKMCLKKKIIKEKKVQQIFRERDILRLLSTPANACPFVVHLFCTFQDDESLFFVLSYAPKKDLMAR

SEQ ID NO: 170111 - protein, 242 aa, Heterodera glycines
ALISAEEILDTKISFLESVRKIKKTHEEINRAFDMEKFDIIQRTMRMYFESEDSSDVFEGFLNVVKYVKSLTTEQLDISLVKLALLAFYEFQKLGIAQGQQIPFDLHIDKTLLLDALVPCFRLKTKYIEAISSVFHLKDREMVEVAIAQIKTLLENEVPKAVFWMDHLNLRDHFPFNTIVCKLILENQTALIYPFVGESQFRRNKLIHYLDNLLGLVLRNRRAEDEYEREIMKNQKQLEKVG

SEQ ID NO: 170112 - protein, 97 aa, Heterodera glycines
  unsure (1)..(97): unsure at all Xaa locations
KFCDKILIQKITLLLVCQFQIVPFRLTRNMVDGFGATGVEGTFRKSCEKAXKVMRAESRMLRTVLHAFAHDPLLEWTTTEARNQQYRQVRLVARAVY

SEQ ID NO: 170113 - protein, 173 aa, Heterodera glycines
MFRRFISSAPNVAKVFGGVGLSTVVAAAIPDVELKKKPDWYQETVHRLEKTLKKLSTYAYIENSDILEDAKDILMRCENVNNCDISWRLGRALSEKGDLFSVVDSENRIEFFAKAIPHFQKAFTLEPKNGSAGAHKWYAITLKRLRLITSQHPYVKNANKEVIEHLEKAHQID

SEQ ID NO: 170114 - protein, 149 aa, Heterodera glycines
MFSLQAIAVPEIAKKLKCTLIPGDGVGPDQSYAVQDIVKATGIPIEFEEVFLSEVYYSRSASIEDVVDSIARNNCVALKGAIQSSLDDKTDGLNTQLRKRLDLFANVVHIKALEGIRTRHNKMLDFVIIREQTEGEYSRMEHELVPGVI

SEQ ID NO: 170115 - protein, 155 aa, Heterodera glycines
MHIINNSIWLKFLITAFLFKIACSKFGSSENKGFFFYFGYGSNLLEERIHVQVKGATFVAIGALKGYRLAFVDFEEPNRWHSAAATIEQKQGSLVWGCIWKVPNSFADELDKQETKYKRIDVTVFPRPSTNERFNLNMRLFSNFVIKCRTYQYER

SEQ ID NO: 170116 - protein, 162 aa, Heterodera glycines
MFFTICSFSRFPFSSHLLFFAPFSSRAFVNSFSLRTHNCGELRLSDVGSRVKLFGWMAAKRMNKFVLLRDSYGSVQTVLPKALFSSLKNTNFESALCLEGVVADRGKERNDKMPTGDIEVVVDGLEVLNPSDAPLPVDESSNEYTRITHRYLDLRSEKMQRA

SEQ ID NO: 170117 - protein, 220 aa, Heterodera glycines
PNGPCAAHLLNLAVQEALKRDESISSLLAKTRHIVGRFKHSNTAFSELKKIQKLLDAPSHTLLQMVCVRWNSALTMCERLIEQRAAITQYAVDNNEFELLLKNDEWEQIEELVGVLKCAEEATKRFTAEPISFVIPQARALHDELYEMKIVNRTVETIRTTLYFAVERRFFGLANLKEYALATFFDVRFKDKVLTENSATFRARVTVWIKNELKEWENDN

SEQ ID NO: 170118 - protein, 116 aa, Heterodera glycines; identical to SEQ ID NO: 162560

SEQ ID NO: 170119 - protein, 125 aa, Heterodera glycines
MMEMTILGNRISITADGAKVSPFGSKMDMGDYYVENNKLRKTRGLGWVMAALFVVADMAGGGIVALPTAVVRCQFFSGLLILLCMAIISTFSAVMLGQCWEILLRRFPVYRTHCRKPYAEIGLKA

SEQ ID NO: 170120 - protein, 158 aa, Heterodera glycines
AKGLQPWRSTTTTTTTTTTVTTTPIPQRPPAPVVTPPAAPPRAVLPDLPPQTVPTNARLQNFGPSANELQMNRRVDSSTDNDGQSASTLRQANKGGTRRGGTKRQDKANRALHMRLARLRQSQLAAKREFERNMQMKANNAAQSPASNCFDRAPWCSG

SEQ ID NO: 170121 - protein, 141 aa, Heterodera glycines
VSLFLLSINAQRYGSHSYGSGTYGTNYWSSSYGNSRTQPSYGYGGQQSRYGTHEQNGGENGQFERQNAWRGGGGQWGQNQQNWGQPQQQQGATAAVEGGWGRRQQQQFPSPAPPKTQNNWDNSDNFAPSTAQNRGKLRVDL

SEQ ID NO: 170122 - protein, 204 aa, Heterodera glycines
KFCSAFSSLFRLFLHLYTSSRLGDSTRTYAKQQLYWPPLQSKFLFPHRSIESVPPVAVLRQRLLRLVVQFQFYFRAVPLRVVPYLVFGSCCPRQRRAGICAHGRLQWGPGWPRVVKNCNIGQSTADGIAAAVLPPARRRSLPFGWRSVPHLRERRPRRSQEAGGLHVQSGDRGVATVVHTKGGTPKSAQLSHQPTRNESLWWPT

SEQ ID NO: 170123 - protein, 178 aa, Heterodera glycines
MLNHIYNINTTTAATAQQPRKRGTTGTTKHGTMPAPTTTKASGSSERGGGTQFHQFTNGRQVTTGQRRKGATGNEARDRTLASQPPLLPPLTSVYDFKDVVGIGSGAFANVFRARELITAAPAERYRHVALKRINLSAIEKENQLMYESVLNEVDIFKSLSHTNIVKCFYSFTEISPH

SEQ ID NO: 170124 - protein, 175 aa, Heterodera glycines
TKANRRCCRGRICCVSPAKSRNGTSDASPDGSIGACPPVSRRTSTGAASAVWTYGKHRGTLRSIFLNIPLHQCPLCEYGAAEARLVQRHMRNNHTLKECEGMEPIANVEKHRAEFSELHNQCFPGRPKRLSNITIADESRRAKCRGCAQTISKKRRLLHLLEKHLKKPIYKCKYC

SEQ ID NO: 170125 - protein, 117 aa, Heterodera glycines; identical to SEQ ID NO: 162548

SEQ ID NO: 170126 - protein, 235 aa, Heterodera glycines
  unsure (1)..(235): unsure at all Xaa locations
HHFSVLFVLSFFSFPLFFAVFVSSAAEQNANLQKQQQLFTIEGKTVVNAELQRIKPNWKAXKRIFLDYGKFVGFIRQDGSFIVPDVPSGSYILEVASGDFQFESVRVDITNSGKIRARRLNLVQPNVVSTLPYPVKLTARHPMRYFRVREEWRVTDVLMNPMMLMMGAAFILVVLMPKLAAQDPNVQKEMQNMQLPKVDMPDMADMLANIWSSGSNKKGSRKQISSGQSTKRVTR

SEQ ID NO: 170127 - protein, 112 aa, Heterodera glycines
MSPKSSHVNYDLLPEISHTFRSPEPRPSVLVSDMFSVLCASPLIILFLLWLRIGINFGKFKFSLSALGFHLGLCVFFGLYVFFWLELNMFQTLKWLAVIGVPTLFLGSRLSF

SEQ ID NO: 170128 - protein, 184 aa, Heterodera glycines
  unsure (1)..(184): unsure at all Xaa locations
MTLRNDTPMPPDEELRVPHEISLSSPWLRAVAVYMGIACEKEAKEFMLLRSERDNDPRKALPXGRAVTACAINFLRKMRRECGDEIRDYANCFHRESGRMHLHQCRRAQFPMDICADEKLGVRRPMVGYFNKLHVHESAVPPPDPLERQKLYRDYKAEGGKLLEELPEDWKTDPKSVQKYRKHF

SEQ ID NO: 170129 - protein, 123 aa, Heterodera glycines
MSVPETHSPTVEQLPKLPTELQSEVAQRAGLKHVTTLEKNVLPTKEDLEEERKHESFKKGIQNFDALKLRHVETEDKCMLPSSNDIAVEKTPQLAAEFDQSGLKHVETTVKTNIEVIDKAEQN

SEQ ID NO: 170130 - protein, 159 aa, Heterodera glycines
GTPGGEQTIDGVAVHWYSPGDYDKLTKVHNLRPNKFIFASEACTGYEVFEHKVLLGDWSRGRAYARDILNDLRNWVVGWTDWNMCLDLEGGPNLARNFVDSPIIVNASAGEFYKQPMFYAMAHFSRFVPRDSSVIGSSLFVANGGVNKLGEKKVDKSVV

SEQ ID NO: 170131 - protein, 75 aa, Heterodera glycines
LDLNRYDPYELLARCRHFVQQRDLLNAVRVANLIRGKSARIFSDWLKDAKFHLEVRLLVELLLAHSQASGIRTTY

SEQ ID NO: 170132 - protein, 163 aa, Heterodera glycines
MDVSVGEESPHQQRFLEECLNLSQKFLKEMSKDEEQQQNVINGEANDGKSDVAKELLICHSSSPTASPQPSGCFLTSANVVAELDRIRREQNRSGAGEADGQSTAATTPNASRRPSNSSAAAVSGSVEDELAKIKVVLRQHERRIRLLEDQLADANMANAYGI

SEQ ID NO: 170133 - protein, 128 aa, Heterodera glycines
ACIYTATAPNLTCHRQDQSLMEILRYNMEYRQQIEGWFENQSADPNFFGISYARFCFSKIPVPNYSFFPNNLCIFKSDPSFLTQLNPAHPRSSNRPLQSSGIRGFFDLLRGKHFGGSQSEWLQRVQCC

SEQ ID NO: 170134 - protein, 151 aa, Heterodera glycines
SMNLRKKPKVEPIEDEIPENEQQINISTRSHNSSYNSDRVNENDLVKSLSQCLLANVSKRGFVRDADIGEMFSDRRERELRANVLKKSEKLLMDVLGYRLDRDEEGKRFYLSTNLCKGIAMAMEISDDTHRGLNEFADEDAFEEESTQTEQ

SEQ ID NO: 170135 - protein, 117 aa, Heterodera glycines
LKGRVDIVLCSAALLYVVPILELNDADIQRSMDVNAMGTINTIRVFLPEMEARGKGHIVAMGSIASHFGEVFQMAYSPTKFAVRGAMECLRVELKERGLEDILCTTIYPFYVRTPMV

SEQ ID NO: 170136 - protein, 153 aa, Heterodera glycines
MKPQEFSGADNEQPSPSRHSIIGVKRKFSSIDYASSNSPVKVLPSFTSTFLPDLSNAQVLKPKPTNVDRLPLSNEEFITPTQPKKQQSRPNSPANGVSKLILPRSRVASIRRESDCNPEKGFGEAEAAHEKMVKSAQQVAMGFEDFCLDDKAF

SEQ ID NO: 170137 - protein, 132 aa, Heterodera glycines
MLVDSLRPATLSSSKKRSAHSIDDTDQFIDHSPPHKKQLMDEENDQILTQNTPNDSLDRRRPIAFATKAIHAGNRPEQWDMNQVVPPISLSTTYKQSRPGEPKGHDYSRAGNPTRDVLQENLASLEGARFAR

SEQ ID NO: 170138 - protein, 201 aa, Heterodera glycines
MNIQSSRSVLDDQWHTLLVEREAGAAVLYLDGRLEAQNRTNLGTIELLQLQSPLYIGGLPPELVPLAARLLPGVKPEFGGCLREFSLNDLALEEPVAEKDIAQCSQFIEQGIFFGKDGGYAILSPQFVVGLSFSFELELKPRTKTAVLLSVGVLEFLSLQLLNGTGKFREGQRWRHGIRCSTSQSVPTSWCDGPWDPDPNL

SEQ ID NO: 170139 - protein, 125 aa, Heterodera glycines; identical to SEQ ID NO: 162536
  unsure (1)..(125): unsure at all Xaa locations

SEQ ID NO: 170140 - protein, 146 aa, Heterodera glycines
LLFHFIFAFKNVSLLLQLNLRFMSSVRRMLFLLGRKCCCSTVPCSATANGFGSIQRRRLWTSMARLSSSGPFICMMPLKKRQMFISDVYKHDHFLHFDHLHIDNIHCARKLVVHLRPSERTLLLQALTELNAEAKTDGNGHSGGPP

SEQ ID NO: 170141 - protein, 159 aa, Heterodera glycines
MIFRQFLRRFLVANHRFVPLESFWVGRLNSVLHSTVCGVGPSNFSTGFANHLVQHRFFSSQSDGLNVFELGSENDFDDRVLQAQQPVMVQFYADWCGPCQNLAPRIEAKVNGQNGEVLLARINVDSSLGFLTAQFDVTSVPTVVCFHNGEVIHRFEGDV

SEQ ID NO: 170142 - protein, 45 aa, Heterodera glycines
EWNRFSGFRHPFKKKSRPSVRENTFFKFFFVVSFLKKFSRQTKNN

SEQ ID NO: 170143 - protein, 147 aa, Heterodera glycines
DARFQLREQLIMYCINDVAILRESVLRFRKLIGEHTQGLDPFLVSSTAAGLALSTLRRCFLPFNRLVHSPEGGYLRGRRASAESRRYIRFFELENPGAQVQCADWSVGEANIEDTGYRVDGLWRREPPLRPLAIEWMGCYYHGVLSS

SEQ ID NO: 170144 - protein, 26 aa, Heterodera glycines
NKLNQKIFCRHPPPFLMYVSVKKIQV

SEQ ID NO: 170145 - protein, 143 aa, Heterodera glycines
MDVPQAPDKKAICVLANNRADSKEGVGTVMFQQKDGEDVRVTVVIGGLGPDHQHALTIYQFGDLTVSSGNFHSTGKHFSHAGQKHSPPEAVSRHVGDLGNITADSKGVAKRNWSDKVISLFGQNNIIGRSVAVHARKDDFGEG

SEQ ID NO: 170146 - protein, 63 aa, Heterodera glycines; identical to SEQ ID NO: 164842

SEQ ID NO: 170147 - protein, 79 aa, Heterodera glycines
IFKISRFPVPKKNRGPGPGFSGPGKSRSRFCPKFPVPLHSSKNLRILSLLMIQLQFANLLNVFAIVNVRALYCAFGSHL

SEQ ID NO: 170148 - protein, 97 aa, Heterodera glycines; identical to SEQ ID NO: 164839

SEQ ID NO: 170149 - protein, 197 aa, Heterodera glycines
MSSGDEATTPALTSGGGASSTRTAGGGSAFQRWGGNRRGSHLVGWDSARPQSAARQQQQMLERMYSKSELHEYQQLFKMFDTDGSGAIGCEELKGAMLSIGLQADDAEIERLIKEVDEDGNGEIDFPEFCQCMKRSQQSGGIKGRLSNEEVSRQCFEVFDQDSNGLITENEFIYVAKEVGGFSQELAEFVFRELLGD

SEQ ID NO: 170150 - protein, 325 aa, Heterodera glycines
MFRIVAKRSLSTTRQWLQQPTHRPPSSALSAEPFMNATSGVYIEQMYESWQLDRGSVHRSWDAFFTNVNAGAAPGQAFQAPPSVPSLSTVPHATVVPRDMREVQPQTAGQVIPADELTRAINDHLKIQVLIRSFQTRGHNIADLDPLGINSADLDDTIPRELELDFYGFTEQDMDREFLLPPTTFIGGERATLSLREIYKRLKKIYCHHIGVEYMHLTNDEQQDWIRNHFEAPEVTELPPEQKKVLFKRLIRSTKFEDFLAKKWPRKTRFGLEGCEVLVPAIEQVIDCSHELGVNSIVLGMPHRGRLNVFANVCQQPVSTVLGLF

SEQ ID NO: 170151 - protein, 115 aa, Heterodera glycines; identical to SEQ ID NO: 162526

SEQ ID NO: 170152 - protein, 77 aa, Heterodera glycines; identical to SEQ ID NO: 164830

SEQ ID NO: 170153 - protein, 122 aa, Heterodera glycines
MPTPSRARVYADVNVNKPREYWDYECHQIRWGNIDDYQLVRKLGRGKYSEVFEGVMVPSEQKVVIKILKPVKKKKIKREIKILENLRGGTNVIGLLDVVKDPVSRTPALVFEYVNNTDFKQL

SEQ ID NO: 170154 - protein, 171 aa, Heterodera glycines
MTKNQAAEQARLQAEQQLKAQQEAAKRQAEERAQQLKAQQQQQQQQSVQVQQQKQQQPPISPSATAQQQKAAPAPAAQPPAKAPQQPQAPKAAVAPAQQQQQPKAAAPPPPKAAAAPQQPKATAVAAPPKPTAPPAVAPQKRAPSPVVREVQLPEAPTQPILRHAEYTPKL

SEQ ID NO: 170155 - protein, 125 aa, Heterodera glycines; identical to SEQ ID NO: 162520

SEQ ID NO: 170156 - protein, 159 aa, Heterodera glycines
  unsure (1)..(159): unsure at all Xaa locations
NQSSPLLMPRSTRATMSCSSRATRSGSRFCGSGGPAPRLYIWSGGVLPTRLTSRLNSLFSSTSITTFPSSISSAAHPIARPNCCFTSWTSESGSSIGSGSDSVGGCVXTSVGAGPSTSGTKSCSLREEVDGTLRFRGGTTSPTALRSRLRVILSVAPKS

SEQ ID NO: 170157 - protein, 120 aa, Heterodera glycines
MHKVYGYVGIRGTVAYVPQQVQILNRTLRENIIFPVTEEEKPDEQHYAKVVKACALTADFSVLPNGDQTEIGEKGINLSGGKKARVRVMERKEYGRTKKLGIVKKSAKDISTVKDFSTEK

SEQ ID NO: 170158 - protein, 160 aa, Heterodera glycines
SIIITFHNEARSTLLRTIWSIFIRTPSHLLKEIILVDDYSFDATIGRDLFGIDKMRIIRNRKREGLIRSRVHGAIIASAPVLTFLDSHCECNVGWLEPVLQRLVENDKAVVAPVIDVINMDNFNYVSASSDLRGGFGWNLVFRWEALGREEKLFRRKKPE

SEQ ID NO: 170159 - protein, 123 aa, Heterodera glycines
YIYYIIRANTVYKQKTNQYKKCIYICTFSIFFGSWIHSKLCCFNDSSYTNFVFRICVHLQTCSKKQTSKKMKRNGNSICSETKSPLLELTPKNALTFRGIVWAGPFVFRDVTPPKAISLNSEV

SEQ ID NO: 170160 - protein, 169 aa, Heterodera glycines; identical to SEQ ID NO: 164344
  unsure (1)..(169): unsure at all Xaa locations

SEQ ID NO: 170161 - protein, 173 aa, Heterodera glycines
KTPVWWSSERHIGFNHLVQAVDVGDFVELYDGGGPIRRLPPGPALPKTRILDGSNGTRSCLKVKVNFMPLDFLLFPVSAKEKNLRMAMSAELGPIPIANENSFKLHCFYRGVATLFFAKDSKEEMIAEVYNTPWLIKSDGASLAESDFSTIVHTFAFCQSQDVHRQGLVVDAS

SEQ ID NO: 170162 - protein, 143 aa, Heterodera glycines
  unsure (1)..(143): unsure at all Xaa locations
SQFFSRSYESNLPTSLTYIILSTXRLFTLETCCGYRYDQAGDSNSFPRIFKGRVFFTRHHRNRGALRAQHPYLXAEPLPGTHTLNQKRELWLGLHTTSASSFALPRKTALANXISLAWRGNVNPLPFRQPDGPTAQAQKSRHP

SEQ ID NO: 170163 - protein, 315 aa, Heterodera glycines
  unsure (1)..(315): unsure at all Xaa locations
PQKLQLANKYRRPVLXIAEDVDGEALTTLVLNRLKVGLQVCAVKAPGFGDNRKNTLKDMAVSTGGTVFGEEASLIKLEDIQIQDFGEADEVTVTKDDTLILRGKGSQEDVEKRIASIQDELDASTSDYEKEKLNERLAKLSTGVALLKIGGASEVEVNEKKDRVTDALCATRAAVEEGIVPGGGVALLRALKKLDTLKPDNDDQKSGIKIVQKAIRQPISTIIANAGLEPSAIVEKALANAETNYRYDAMNDQFVNMLEAGIIYPDKRRARRRCTTRPALVSLMATTECVVTEIPKEXPTMPSGGGMGGMGGGMG

SEQ ID NO: 170164 - protein, 49 aa, Heterodera glycines; identical to SEQ ID NO: 164794

SEQ ID NO: 170165 - protein, 141 aa, Heterodera glycines
LNEWREWTRNPNGFSSHCPPKCPPSARPFLCQFPSLLHSATPRSSVRDQAAPAENALRHIAVIAHPPAEKRKAQDRSQFALLRHAFPPLRPPPLHSHIPHKNPQSVYQRDENSQHFYDYWSAAPPPNVCCVKNNSLHFCGQ

SEQ ID NO: 170166 - protein, 157 aa, Heterodera glycines
MGKNKKPFIDRKSAVNYTLNNRELEETQRISDYKSFSFRSLDKRFEGIYEDYANEEEEGAEEMDDEEGQTGADSAIFRSLLADGQSQRSCEERFHRELPDSELKGAVLRYAKAMEIGKGRAEPTEDILVDSAKRSRWDCESILSMHSTLYNHPTEIR

SEQ ID NO: 170167 - protein, 182 aa, Heterodera glycines
SWSSPRWRPLFTSGSPGLQDFRTRVLAMAIARQFRYSIYLLLVLVRFSLHQSAELEDLQRLCPDLKGAFCSHCDHKSVEQICPIECNFCSTFRSNETPKFFGNAAENLIELKRQCATIRLAFCNVCKITSINELCVEECLDCEAGLRDEQKEVVPLVQTWQQSAGDGLAIGDDGTNSAGEAA

SEQ ID NO: 170168 - protein, 129 aa, Heterodera glycines; identical to SEQ ID NO: 162507

SEQ ID NO: 170169 - protein, 95 aa, Heterodera glycines
MAPAKKKWSKGKVKDKANNAVTLDKATYDKIYKEVPTWRLITPSVLVDRLRLNGSLARVALKELADKGEIKLVSAHGSQLIYTRSTIGAEPVAAA

SEQ ID NO: 170170 - protein, 100 aa, Heterodera glycines
MPRRATTLARRNSPTSTPSSTRSTPTRTWATCKSTLSVPTRPRVTISASRRCRTLVSCRRRVTLGPAITAMATGPPRVTSRPTSPKPTKRPGTTLARRRA

SEQ ID NO: 170171 - protein, 159 aa, Heterodera glycines
SLTINNDILDDVIAFIKRSELAQNFSLVSHHFNSLAQRRMHDANAHWVEGDCVFIANATTTRMIIPRGNNGGFEEVPVPTVAQPSYVLGFRGTIHFNGTLSDNALAFFRHALPPPTTLYRFSVLDEFYRANGLLSPFKTTERINTFLDTCVHLVELGGD

SEQ ID NO: 170172 - protein, 154 aa, Heterodera glycines
LSNKSLISFFLLQIFFVSFASRAVKRSLYSAKFPLALNEIRSVVSLNSYFSKIVQFCSGVLLTENIVLTAAHCILSDEFGLADYIHVKGFGWNAHSTEFVIRTDFIFLDLEDSICADIALIFLPPKVTGIFGTAKFTKFTESEWSNKSDSDSKI

SEQ ID NO: 170173 - protein, 56 aa, Heterodera glycines
KVHIYYICDQISKIAKTKSGGNNSQKFKKIYFLRKSKFLINGGEWHTNVAQNKMFI

SEQ ID NO: 170174 - protein, 135 aa, Heterodera glycines
MASFILFIILIITKANNSMGQDSGTNDVQLTLVNGCPYKIYVAGAVQVNLTVNERQTKNVPSVSTAQRLWANTDCDSENNPLCNLQAAMPPISLFEWTFDADGKQTYDVSYVDGANVPISVRVLNCPGVNFNKKL

SEQ ID NO: 170175 - protein, 148 aa, Heterodera glycines
FNLLYQLHCWVRAIVANQMARTAREWCHIFKRFNSGTYNNQWLIVDYNKFKPYTELPDHGLFYVLEQMPTIVLYQDMTQWLKQNGYFASYNIPFFKKTSLISGFEQKGNEFYWFSWKSCPRAKIFARDQHKVVDVDSLTKLMRYNDYT

SEQ ID NO: 170176 - protein, 77 aa, Heterodera glycines
LFSVFPQNLFGYSCKSLSGKEVDWFVAYKLPDLGSDGDGTAFLYSDANTAAWRLSDKNVEDKTSAIGLTVSQLFTAK

SEQ ID NO: 170177 - protein, 155 aa, Heterodera glycines
MVLCERTFSLSEPLLPETIKFIKESLEKQGELHFELPHVFVVFGASGDLAKKKIYPTLWWLFRDGLLPRDTHIIGYARSRLTLETLRTAFEKHCNVRDGERPKFEQYIKHCSYISGQYDTDEGLIALDRAIIEMEHTFKKPANRLFYLALPPEVF

SEQ ID NO: 170178 - protein, 96 aa, Heterodera glycines; identical to SEQ ID NO: 164778

SEQ ID NO: 170179 - protein, 91 aa, Heterodera glycines
PQTWYQQLPSLVWPYQTILRYLKRKQKKFLTKKWLSLFSHFFTANLVPTVAFSCLALSNIFFLIFLPQTWYQQLPSFVWPYQTILRYLKRK

SEQ ID NO: 170180 - protein, 82 aa, Heterodera glycines
NTKDKFEVGLDVQFFAPQEIEVKVSGQDVIIHCLHEIRKDQHGSVKREIHRQYRLPNDVDAATLKSHLSTRGVLTLTASKKD

SEQ ID NO: 170181 - protein, 132 aa, Heterodera glycines
NTKSQLMSGQSAQKDGKIAATILIDPVTQKSANITIRTPAQQLRMEQIEVPYKVRPFAFDSPRSAQQKHSLAQLVHPFASIPPPMDRLKGQRELFEDLSTGPPSLQWYTGGGKKGGQTPPIWGGCKKSAPPP

SEQ ID NO: 170182 - protein, 179 aa, Heterodera glycines
MTYRDGDRPQRKTWVQKQTEANKSTPTLNLSSSGNGGPSVEGRTRDTHLSGDELADNSPQKGQQQILNQTFTKSSTKEYDSATLIAPVSNGTESLNNRSGGLVLEDVCDSNSEMTPEMQAKRRAILASQIRRKERIMARSEEKETEEMDRLQVKMQRMEQAEMRRMEREQRRQKLLEDY

SEQ ID NO: 170183 - protein, 140 aa, Heterodera glycines; identical to SEQ ID NO: 164771

SEQ ID NO: 170184 - protein, 177 aa, Heterodera glycines
MFLKRRISEPSDEDEKQRTNQIPIDNNSCVDGIPLNIQSLRKTYVDREEPFLLEKDMLSCPFDQFSIWFGNAITQTDLKYEEVNGFALSTVSRNGRPSSRMLLLKGFSKVGGFVFFTHSNSKKGKELSENPYVSALFYWPKVNRQIRIEGRVEILGEEVADVYWSKRPIESPRGLRS

SEQ ID NO: 170185 - protein, 154 aa, Heterodera glycines
KMKLGICISWGRTGGRLMVPPSNEPIRPFTLIWNKTDGLVALLGQKLEKGTWVLFTLSTRTAFLHSVDRKLVDRVSITDQRRETAVDSMNIQVMAFVRSFRRYNDYYRIGMDQLIGWVLVSEDSFVRRVVLQENLAAQMSIIFQHDCVRGFNWV

SEQ ID NO: 170186 - protein, 159 aa, Heterodera glycines
APQQIPQTSQVIAATVISATGASGVLQLGQQSSNSEFLSAFECPVCLDYMLPPYLQCPSGHLVCGNCRPKVTACPTCRGPIPSIRNLGMEKIAASLQFPCKFAHSGCTQFFYHHEKVEHEEICEFRPYQCPCPGASCKWQGSLADVMSHLMKLHKSITT

SEQ ID NO: 170187 - protein, 78 aa, Heterodera glycines
FCHIVFLKQINKERNYNWETIKSSKTLSLQWLTDVLLHSLHSKIHRFYAFCHRFSVVIATIHHVKEIRDKRARPTIFL

SEQ ID NO: 170188 - protein, 59 aa, Heterodera glycines
KCINLLSTVKKSDDKQNEYPKRNKRSSFLFIQILFGFFAGNSSLTTDGQSTPSSSKTIS

SEQ ID NO: 170189 - protein, 209 aa, Heterodera glycines
SRKGETTVQPLQVSLEDLYKGKNTKLQLTKKVLCKTCNGIGGKQGSVRKCDRCQGSGKVFRTRQIGPGMIQQMAARCDQCSGEGEMVDEKDRCKKCVGRKTVQEQKIIEVKITPGMRDNQKIVFYGEGDQEPGIEPGDVVLVIKTKSHEQFERKGDDLFMKKTVSLADALCGFTTTIKHLDGRQITLTTMPGDIIKPESIRGAIQEGMP

SEQ ID NO: 170190 - protein, 159 aa, Heterodera glycines
STSIFSLSLTIRGHCSDPLVVCTSSRTFGAKDVEVSNTLLLLDGTPNGAGANQQHIVSITNRFVELSEAFLPDQTFRLKALLEQNLLDFYNENAPAAEESKGIKLNELLDHVQISEQQLREELAKFAVVEPAEGVATFTRLILNLEIYLLCICSLIIVR

SEQ ID NO: 170191 - protein, 141 aa, Heterodera glycines; identical to SEQ ID NO: 162246

SEQ ID NO: 170192 - protein, 158 aa, Heterodera glycines
LSVSFSADNRQIVSGSRDKTIKLWNTLGECKYNIEGAHTEWVSCVRFSPNPENPIIISAGWDKLVKVWDLSKSKLRTNHIGHKGYINSLAVSPDGSLCASGGKDGIPMLWDLNDGKHLYSLDAGEEIHALCFSPNRYWLCAATTSGIRIWDLQTKEHI

SEQ ID NO: 170193 - protein, 51 aa, Heterodera glycines; identical to SEQ ID NO: 146846

SEQ ID NO: 170194 - protein, 149 aa, Heterodera glycines
MSSNPVEGTENLGQLRQTAPQQTTAADPSSLNSSNSAAVESMDSEGVYLFADRTQSSNSLTPEQAFVHMVKAMLGTGLLSLPYAFSHSGLYLGLILLVLICLVCMFCMRQIVFAAHYICTKNGREIIDYANIMRGAVEAGPSWISSRGY

SEQ ID NO: 170195 - protein, 202 aa, Heterodera glycines
SFVHFAIPMSPPKRAKVSADDDGETISDDGEPSTSAGAKRKQKASKPRQRKAHEAFILLVDVGRSSAENSAGAQSDHGTTTDLDRSVQIVDWVLSRKIFTESSDRFSLMFFGHENTSSDDHPNVYVHNEQFATARVEWLHVLQNEVQTNVKCPGDYVDALYAALDALKVHFDDAKEAGEPMSGATVTLVSNLSGLDDERAVM

SEQ ID NO: 170196 - protein, 180 aa, Heterodera glycines
MALSLFLLLVGTIIANCNGDPKMKSVEEKSVPPAAFWPYILHPKTPRHKSEEREDYYDAVRAEEEEAEKATLTSSTAANRGNEKQQEEEEGEEEARQLQQMMALLLANIDPVPMFTANSEKPKTIAQTMAPTKAATALTMSKVDGETYDERTEAGKDDEETDDDDDEEHETRKMVDTELK

SEQ ID NO: 170197 - protein, 162 aa, Heterodera glycines
IALVRMCKAHRGMTVVAIGPLTNIAMAVRLDPDFLSYIDKLYIMGGSLLAKGNATRTAEFNFACDPEAAHIVFTSSTKHSTRAPKIVLAPLELTFDQAFDWDLIARLSDPSRHAAHPWSKFLYRITAALRRMFRSPAHLDAVAQAKDKHQARRACAAAPCCA

SEQ ID NO: 170198 - protein, 95 aa, Heterodera glycines
RRVRSLNFSTKFMCSDNNELLKDPSAAHKLTLLLANRHRCHKSRKTLADFLRKKFHFHNRRVKNCATNLTTTTKFFTDIRKGCYTKSIERGGGIA

SEQ ID NO: 170199 - protein, 141 aa, Heterodera glycines; identical to SEQ ID NO: 149838

SEQ ID NO: 170200 - protein, 119 aa, Heterodera glycines; identical to SEQ ID NO: 162461

SEQ ID NO: 170201 - protein, 113 aa, Heterodera glycines; identical to SEQ ID NO: 162232

SEQ ID NO: 170202 - protein, 151 aa, Heterodera glycines
QYKGVLQFGSFKLKSGRTSPYFFNAGLFNTGDLLNQVGRFYASAILDHEATFRPSVLFGPAYKGIPLVATTAVNLAVMGHNMPYVFNRKEAKDHGEGGSLVGMSKLQGERVLIVDDVITAGTAIRESFPLLRDHNGATVAGVLVALDRMER

SEQ ID NO: 170203 - protein, 68 aa, Heterodera glycines
RALRARFLIFFGGYSAASRPQDGRFAPVFKLCREIRTLRLKEVHLVPVSCSPGDPLVVGRPPPRGAPA

SEQ ID NO: 170204 - protein, 60 aa, Heterodera glycines; identical to SEQ ID NO: 167207

SEQ ID NO: 170205 - protein, 58 aa, Heterodera glycines; identical to SEQ ID NO: 164747

SEQ ID NO: 170206 - protein, 260 aa, Heterodera glycines
MAEENTNQSEGLDFFLNRSGWTDAQLEEVIRLLYGKRLQQLSIAQRFLDSAQEANFELKGFQMVAQEEQCRRPKKMRVAAIQNKIVLSTSAPVQAQRDALHQRVGKMIDAAARAGAQIVCLQEAWTMPFAFCTRERLPWTEFGESAEDGATTKFLSELAKRLGVVIISPILERDIHKDDLLWNTAVIISQTGAVIGKTRKNHIPRVGDFNESTYYMESTLGHPVFETAFGAKIAVNICYGRHHPQNWMMYALNGVLLLML

SEQ ID NO: 170207 - protein, 75 aa, Heterodera glycines
LSSVSPLLVVAFLVPQKRPPSVSPPPLNSPPPISSAHQNQRLLVCQPQLPPRQVLSVLRQQSFQLRLARPLCRRF

SEQ ID NO: 170208 - protein, 107 aa, Heterodera glycines
  unsure (1)..(107): unsure at all Xaa locations
LLILTLPVLAGAITLLLVDRNFNGNFFDRTGGGNPLVFQHLFXFFGHPEVYVLILPAFGLVRLTIQFYTGKKILFGYLGIIYAIISIGFIGCLVXAHHIFVVGIDID

SEQ ID NO: 170209 - protein, 134 aa, Heterodera glycines; identical to SEQ ID NO: 164744

SEQ ID NO: 170210 - protein, 85 aa, Heterodera glycines
GKVTFKITLTSDPKLPFKVLSVPENAPFTAVLKFAAEEFRVDPSTSAIITDEGVGVNPAQKASDIFMKYGSELRLIPRDRVGQGE

SEQ ID NO: 170211 - protein, 148 aa, Heterodera glycines
MASMSDRMKLMLSSGKGADVHFLVGQSDAKKILAAHKTILISASDVFETMFRFDAKNANVGNVNNPVEVPDVEVGAFNVMLSFIYADDLSQLDGDNAMAVLNTAKKYNITGLVTAIKNMPIAKICGDVFMTLAQSRLFEESDLVERSL

SEQ ID NO: 170212 - protein, 38 aa, Heterodera glycines
KIIFYFDDATHLFSFLSFMKRAIHSSFIDHLYTLYTQN

SEQ ID NO: 170213 - protein, 204 aa, Heterodera glycines
RKGLSFKVVVDMNGNTVVYNDRDVPIGTGSVRKVGERSYEAVISKNLFITRLKDVRRGPCCRELTGEECTEPIKLANPQFSHPSQRDDNGTTRLTWPDCFDMSIDVTLPPTVHINRLAMNYWQKQGAIDVWMKFFERAPNRAEMEKEFFSQLDNPLLGKAFKLAIIGEWLAANSLDQGSYTPTNSELLEFWVSKRAPDRLLACE

SEQ ID NO: 170214 - protein, 154 aa, Heterodera glycines
RRTFCLNQMVRILLPNGESANVSPSESVEEAIKHCVGGDISSQNDYSLVFFGRKLNSDQRLADIPHLDGESRSVRLVCRKSPGVSIEKNLADVDKLRSQCRTLYQNLGEELQQKLETYMVDDNNAIFNSILKDHPELVHDPIALPIVKDLRLLV

SEQ ID NO: 170215 - protein, 154 aa, Heterodera glycines
MKKHVTFTPSIGDDVHSTNVSSVAESEFSVKERAEVPEIFKKLADDAFQILPLPDIDPTVTSTPAVVNNLIEAVESLDSRMPLAFQEQQQILKMQGEMLQLGVSCKEHYKKIHEQSVMRYNLEKSVNKNIDDLKEGAVVAQKLVKAKSAYEEMV

SEQ ID NO: 170216 - protein, 412 aa, Heterodera glycines
PTRLRRFAICVGVDEENGTCLMVYENDLNAIEVRMVFSGVQIGKWYRFDLAKGTRRNWEVAEERLPTRIMPRGDAGSGGTRGDRIQLCLPIFFVPNFKCFGCTWRVTSPTSFNDKMHFNFVSPRLEAPGKINFSEERLAELNIRPGEQCFAFLTLDCQGPGPSIKPPQWTLDAVEHFHRVNVDPLAPSVLSVSLGASKEWGILLDLVIESEDERNGMGFILCLRDGKFAFGRILKTEGHNDSCWRANVGDTVGFSLIDVDCFNYPVRLALNVIAWQSPAFTSVDSDVLSDQFPQESLPEFPSVRLISKSTGKMAQHLFELCFPIDDSQMSCLRMGSLKVDRLGVLIDLNGDLLSAWSNMKRKGTDAISSLLLARVRARFSSLPDQQQPLWMVAEMLEIAKMRVDTESKRQTL

SEQ ID NO: 170217 - protein, 90 aa, Heterodera glycines; identical to SEQ ID NO: 162451

SEQ ID NO: 170218 - protein, 153 aa, Heterodera glycines
VMSLYFNVLLVLLVLLVHLFRRYSGRLVAAVLQRLLHARAAHIYGLGWFALRHGELLLANGLHLEVRELRVHSLFNWWWTTTAPTVDSAANDGGGQRMALNVRVSVGTIRVGKQLADEEGSRNATSSICDGQNPLIENCGVLDSVSIHLSRPG

SEQ ID NO: 170219 - protein, 81 aa, Heterodera glycines
LHHPLLQKFTSFFSRILPHMFWSFFYNQWLRFSQQKFHLLLHDERLFLFLADFMLASALITFVTFTFLDACSYGRYALVFL

SEQ ID NO: 170220 - protein, 60 aa, Heterodera glycines
DHIKLEIVFEIFENIKEDVEWELVFVGTDGREEHDQVLDSVLIGPIQEGRHKFLFEVLCL

SEQ ID NO: 170221 - protein, 71 aa, Heterodera glycines
RSIASEGERSLREGDAVNGIKILEKALQCNTFDLSLQCSLHSQLGNAYYARGDYRKARFPSTVRSFYSPTH

SEQ ID NO: 170222 - protein, 159 aa, Heterodera glycines
GILQRYEMQQFRLSCANFESESSCCSTSQQMEIIVDSESDSNLTRCPCCRCAQVNLICANCLNTNVVRIGKVREDKRRLLRSKSAICHLIQNALADEIKFEGEFHQLSRSIEEIRAKIAHKKDQVGRLRQRISHTESQSERNRQNVLLLEKKMVSHSDR

SEQ ID NO: 170223 - protein, 104 aa, Heterodera glycines; identical to SEQ ID NO: 162444

SEQ ID NO: 170224 - protein, 63 aa, Heterodera glycines
HQQSLYSALIIIRSFTFSSCILSPLLLRLGHRRRLTPLRPVQALRRRFLPVVPAHAPLPAEQA

SEQ ID NO: 170225 - protein, 84 aa, Heterodera glycines
RIGAAYVRIHCRRAAAVALLGLMNWTISSDCQRHTTIRPYLSFSNAIVMQKPPHNEGLRAKKCHLLFCCYFMYLNPFYCINANL

SEQ ID NO: 170226 - protein, 155 aa, Heterodera glycines
MGISRDSRHKRAHTGAKRAHYRKKRKFELGRQAANTKLGATRVHQVRVRGGNIKFRALRLDTGNFSWGSESCTRKTRILGVVYNASNNELVRTNTIVKGGIVEIDATPFRQWYESHYVQALGRKQKDVAEVEELNKKRSSRVLRKVEARQANAKV

SEQ ID NO: 170227 - protein, 92 aa, Heterodera glycines
  unsure (1)..(92): unsure at all Xaa locations
KLLQEISQTPSGRRKREKCHFWSGAISCGGKNANKKWHKHSLILTTLIEGLVVVENGETIGQQQEQELGTEKKPPVWVGTFLIWHNLWRNDX

SEQ ID NO: 170228 - protein, 45 aa, Heterodera glycines
IFTVSTDNRLVCRLRYHVFPLKLRLFFLLERKPTNRRFHFCFRFL

SEQ ID NO: 170229 - protein, 64 aa, Heterodera glycines; identical to SEQ ID NO: 164720

SEQ ID NO: 170230 - protein, 146 aa, Heterodera glycines
MLQETEAKSDSSKAPNEVALSSEGRISKLYVECFNEREKCLTVIGGGKMATALVHGLVSAGFIDKSEVNICSRSKETAFRWTTQGYQNAYTNDEFYSKVKKPRGIVIVAVKPQIFPGFLDELRKNGWLNFVGPEVLCVSIMAGIAL

SEQ ID NO: 170231 - protein, 115 aa, Heterodera glycines; identical to SEQ ID NO: 150586

SEQ ID NO: 170232 - protein, 165 aa, Heterodera glycines
VIRLTRTTYIDKSGPLLVELLQNSLLIRRGQKVTVANYTIVPDEKSKIVEYLREYSTKVDCILTSGGTGFSKRDVTPEATKEVIERECPGIAVALLKKGLDITPFAALTRLTAGIAANCLIINLPGSPKAVREGFEVIEPILSHAIAIVKGDESETSVLHKRTAL

SEQ ID NO: 170233 - protein, 112 aa, Heterodera glycines
MGVDSADDDSVPDPIVIKQGESLSLSQLVQKIEQLQNRTVQELLVTLRRRTYKMPVGPPDPNGDRFSQNGHLLVEDVVYNWVRKTRNSIHGIVQLHVLYEGIAMLDEVNYHF

SEQ ID NO: 170234 - protein, 118 aa, Heterodera glycines
QSHLFLMGVASADDDSVPDPIVIKLGESLSLSQLVQKIEQLQNRTVRGLLVTLRRRTYEMPVGPPDPNGDRFFQNGHLLVEDVVYNWVRKTRNSIHGIVQLHVLYEGIAMLDEVNYHF

SEQ ID NO: 170235 - protein, 83 aa, Heterodera glycines
LWNNCGTHFRREVSSKHFVGELNYKCTNSIKVIALLRERARSLVKKWAENECSKDSSLSLVESLYRDLRDQGLSFELDSTTNN

SEQ ID NO: 170236 - protein, 160 aa, Heterodera glycines
MPCSLATQSSVLKRRAPASPQQAKMHDKKRHFDESANNGQEKADKVPSKGDKVSPTNEEKKKNVAFATLAIHAGNEPEKWDMNQVVPPISLATTYKQQFAGMPKGHDYARGGNPTRDVLQQSIAALENARHCRVFSSGLSATAAMANWLHSGDHIIASDD

SEQ ID NO: 170237 - protein, 182 aa, Heterodera glycines
MVLTDSAHADPKNAVPFRLRIDGHWVRVDERLLRAHPGSGAMLAYRDREASTVFHSFHAGSKRAYRWMTEHRENGGATAETEATTEANGTAAKTKKSNGTGAGAALWPDKIDAINMGKFGRSAEANEKICRSFDVLRSRVRSLGLLRADDAFFVLKFVQCVALIAFAVFLQSRDFFLASALC

SEQ ID NO: 170238 - protein, 78 aa, Heterodera glycines; identical to SEQ ID NO: 164707

SEQ ID NO: 170239 - protein, 114 aa, Heterodera glycines
KCLISNVILLQRIYNPSTQIDHYYCHRLSLSRFRLFDIPPFRRCSSACLSSSCNALYSSVYFSNSSLLPRSAASSKGRVGLNALKTTTVPTTIPVKKIAPFRRMNVTRLGPPFC

SEQ ID NO: 170240 - protein, 62 aa, Heterodera glycines
IRLVGTGILPRLVVQVHGFFGQNTGTGSPGKRESRDQVPVHFLSNGNFKIRALIEISTMLNN

SEQ ID NO: 170241 - protein, 123 aa, Heterodera glycines
QLRFVKKSNYHCILMILASSSKRLACQFLIRKVPHFAVTSSRKESNWSEVLDEAVPARKSYRDFQTLNGNQRDALAASLFFLLVNGHRLWAHRVLENTWWRGKRCIRGALDNTRGGKKRRGRG

SEQ ID NO: 170242 - protein, 23 aa, Heterodera glycines
MEKKQSQRQNFKALAEAKSKTKP

SEQ ID NO: 170243 - protein, 71 aa, Heterodera glycines
  unsure (1)..(71): unsure at all Xaa locations
VLLVVAFCVISLGACASGPXAXIKKFIIHRFRGYSFGSFRSFARLRREIRCCRGLSCAVFSSPPMCQFGGF

SEQ ID NO: 170244 - protein, 255 aa, Heterodera glycines
SLSSDIMPFLFPSIVTTNNTAFNRINDKSANVRQKLDMMETALVHLTTNKCQLNFSAEKTRSDIRRATDKHISMLRERELKLFEEVDHIHQREQQLIEEQMEQLNQAIGTSKFVVEKMAAFADEKNLEELISVELDQKINLLDKLANSSKGTNIVFSAAFQQNIPLGQIYVGFAGGSASPQANANDGVSSVASDQRLHFENGSEISFDQFVNSALRGETSVKGGTDQANNHLANCAANGVKREMLVPDATFMDKL

SEQ ID NO: 170245 - protein, 94 aa, Heterodera glycines
HNYHKRPIIKTLVRKRLYWLRSPSPTFADSDHSQNNESSIESAANLHENTATEERPRAESTSQNVGADATACMTTRPSDDNESYLDEQGLRWHR

SEQ ID NO: 170246 - protein, 102 aa, Heterodera glycines; identical to SEQ ID NO: 166063

SEQ ID NO: 170247 - protein, 160 aa, Heterodera glycines
GGDAVPLPSAVADSPFLEVDLNRTLTPQSQWTNESTGTMHPIVDTEPNPIRDAHEPNHIFHYSPSSHSPDDDESSQNGQSSSSQSAPISSALDASLTNLYKEKENDECDDERSMPRRASERTLDRFEDVRTIASSDIEVIRQMDDWSVTSSYPNSSHQQS

SEQ ID NO: 170248 - protein, 136 aa, Heterodera glycines
ILDANGDKQPIHVFESLHQHPVILMQYTAAFDVAISFDEIGMVEYWSGSRNEFSFPKTVNFEFKTDTDLYEFCKIKQMPKALAISPDGRTFAVWCSNSYIYIFDLRSGKIIKKLDETLQRYIEMGKETKGNGLPAI

SEQ ID NO: 170249 - protein, 160 aa, Heterodera glycines
LLSLSELVPLNGRGGSGGVFYKTKDDKFILKSLNPDHDEPAKIDEVLDNYSKHVLGQQPEKGKQSTDSRSMMNTFFMYFEMNVYAKLKEGKGKERKKKLRLHMLQFVVLNNVFEGIDEQTLLKFDIKGTFAPGSAVQHDQKQKWYTGETGWQKSLYREYD

SEQ ID NO: 170250 - protein, 159 aa, Heterodera glycines
SSLRLGSQRSHAVNAVHPKREKPNYERPKSQQSTKTEQQKCWRCGQTNHHHAACPQKGYKCRKCSQNGHIELRCEAVQEWRKKNAKSWLKKNVGNVHIVTVNIGTTAKPTTKSTLLRVKVSFQGKVIEFVLDSGAEVNVINEMTYKLIGSPKIKACKEQ

SEQ ID NO: 170251 - protein, 140 aa, Heterodera glycines; identical to SEQ ID NO: 163101

SEQ ID NO: 170252 - protein, 113 aa, Heterodera glycines; identical to SEQ ID NO: 166047

SEQ ID NO: 170253 - protein, 37 aa, Heterodera glycines; identical to SEQ ID NO: 166044

SEQ ID NO: 170254 - protein, 232 aa, Heterodera glycines
  unsure (1)..(232): unsure at all Xaa locations
MPSNAQKADKTMANGKQQTIGEKQPEHKRRVMRHRHIRLKPNILNSSAAANASKKRHPQPNFDTIEVLEEEHEFEVPINEEEMMRFPGMEEGSQKSDKISVHRRFWQLNWKGVHFSGLPTWLQDNEFLHFGHRPPLPSFGSCFNSIFXLHTETGNILTHMYGAIAFIGIFIWFLVQAEDVVSWPDKLIFSSFFVGAILCMGMSFAFHTVQYHFEDINKLVXKLDYSTCAYYH

SEQ ID NO: 170255 - protein, 139 aa, Heterodera glycines
MGHLLSMDSHIRWPEFKTPGPHLRSQEMKLPSNIGQKKLSNIGLVVTTRKIVSIGLEYPHAYEEIVKQYNDFRSHIVLLQDLKTALHNTELELDQLAAQMPADKECPIIEPRFRVSSTFYEELERSPVRVLNTPMTEGG

SEQ ID NO: 170256 - protein, 119 aa, Heterodera glycines
TLQPAQGDTGKPCGVDYEIKTMVGGDSTQEKPKKHNSVRLAIRKLTYCPQLERIQPMVDVTKNFIISPGGLHLEASLDKEMYYHGESIAVNVHIQNNSNKTVKKIKVTVQQMADICIFT

SEQ ID NO: 170257 - protein, 54 aa, Heterodera glycines
GEGDRLAVQHRQEKEFERTIRTYKSPYISFTYFHSQTLAEEAKRNAHTLVLHFV

SEQ ID NO: 170258 - protein, 111 aa, Heterodera glycines
MNTTSSIPMGPVLPCIGQNNKKYEVMKKKKEKNDEKMTLETNKMAGEKRKRPPSLSEKSFPYNAGLERNKLFVKKLDWSCTGEELKKFFEKFGTVVDARIVTKWDGRSKGC

SEQ ID NO: 170259 - protein, 138 aa, Heterodera glycines
  unsure (1)..(138): unsure at all Xaa locations
ARTRTRHCDRSVSAAELEQXQQRICSSSISSHRHPLLLSFSPSPCLKRNRNIPTKRLRRKALPRMKGACRNRRPPKKRSRXXGGVIXPKNLGDLHRPGGGGAGFFTKQGGETPPGGVGGGISRDPRGGPKNLRGNFWG

SEQ ID NO: 170260 - protein, 159 aa, Heterodera glycines
LRFRKMSNLNFEDNLQRVQVEIQWKQCLYNPIVAPFADVGSYPIFTDEFKGTRKCTLDVYVQGNLEHLDDKVVSYGSSHGTFRAINSFVSRITQLRLIASISSPTQRFSSPFMTLARRICLAWTLPTVRRSLRWSVSVPFSSTFLCQGKRPALKILSES

SEQ ID NO: 170261 - protein, 211 aa, Heterodera glycines; identical to SEQ ID NO: 165858

SEQ ID NO: 170262 - protein, 54 aa, Heterodera glycines; identical to SEQ ID NO: 163092

SEQ ID NO: 170263 - protein, 124 aa, Heterodera glycines
TVHQTFRDRDKCQEEKSALDLTVTTDQEGNYYILFLYLGVPNAEVGLQYHQTSEIRCAPRDHRQLFSGSPNITCQQFCFHFPRNGKRINSPCPWTKPSNTSMGNWKMPTKLPKLRAMDRKSGPT

SEQ ID NO: 170264 - protein, 150 aa, Heterodera glycines; identical to SEQ ID NO: 166030

SEQ ID NO: 170265 - protein, 73 aa, Heterodera glycines
DGLTPCEGGRGPTKSFRVLAVNPKSGGCPQRKVFESLPDVFDSSCHLCPKFAFFCCLLDILRGFSLDYLKNRN

SEQ ID NO: 170266 - protein, 233 aa, Heterodera glycines; identical to SEQ ID NO: 163069

SEQ ID NO: 170267 - protein, 88 aa, Heterodera glycines; identical to SEQ ID NO: 163017

SEQ ID NO: 170268 - protein, 53 aa, Heterodera glycines
TNSTNCAIKWCPDLLRELAKKNVVAFQSWRRRNSRHRTDTVGKNVGDLGTRGP

SEQ ID NO: 170269 - protein, 152 aa, Heterodera glycines
RSSILPFPLQVYYSLFTSLLSVFLAKTSINGLLHRGRMFIFSHSHLKVFLAIPDDWSPIGCQLLDIGAGDGAVTAKFTSICVVEASKVMEWRLARRGFTVLPMDKWQRSGPYSLITALNLLDRHHDPKKLLNSLHELAIEHNCPILLSVVLP

SEQ ID NO: 170270 - protein, 61 aa, Heterodera glycines
FDSLKRAFPSHVLVPKMLLAQKVKGEKEDKSSDQGLSLNRSQCKSCSTANNPLTSSQVVYK

SEQ ID NO: 170271 - protein, 42 aa, Heterodera glycines
LGYQSLKKFKFESDFGHRRKCRGSLQMTFFAFETTFWSAFFS

SEQ ID NO: 170272 - protein, 188 aa, Heterodera glycines
NAFPFCASIHTAEAFSRPTIFSFSSVIGKMLSTYALFYPTIICYIFCFRIWVATASTASYRTAGPKTKVPDKNEWMKRCAAEYERKYCVETDTKLKQQTTKNKEKKKQQQQQDESPEEYYPTNYEPAFNYDKLHVSDIILPLTIHQKDKYQAQNGPTKYEPKAEGQHVTSSVTTAVLILWNCVGIDLF

SEQ ID NO: 170273 - protein, 108 aa, Heterodera glycines
NFALTNVKSSNVRPFFDSPLFLLMLLLLCLLLSVFFIAFYRPFPVLSPPPGVPFLPKHHSHTNSFSSNFPKCPKHHSQPIHSLLTFQNVPNTTATPIHSLLTFQNVTA

SEQ ID NO: 170274 - protein, 141 aa, Heterodera glycines
FHQAANASPFLPLFISLMTLPPSLFAFDQMPTLDPAIPTQSPHLAPSSDSCVGQCALIFTDQMRSQLGSEHSTGLLNLNYNEFLAAFSNSSFFDSFCNIYHQFNFCYTKCPQGFMQELLSRSAEIVDHFCVWNYKEIKTKF

SEQ ID NO: 170275 - protein, 56 aa, Heterodera glycines
IFLEFFAWRNTVLHTYHTSIIFFKLFFAFDPQRSRLIESSPNFAGKLLRTLQMLIN

SEQ ID NO: 170276 - protein, 81 aa, Heterodera glycines; identical to SEQ ID NO: 166002

SEQ ID NO: 170277 - protein, 59 aa, Heterodera glycines
ASVAWWLCLPYFFLLLKFNSLNPVNNYFVFFFISKLVFKLFNINKFEHNIFFIFILYER

SEQ ID NO: 170278 - protein, 117 aa, Heterodera glycines
QDGIPPNECLFCELKSDTWEANLAHMRKQHGFLVPDSPFCTECARVAHLFGCGTLLFQFLFLITFQGFKVGDGLTCVRCQCARFRSIDGLLKHMRRLQPLQLSNLFTTGGACCSLCK

SEQ ID NO: 170279 - protein, 58 aa, Heterodera glycines
GNSADSTPQQYAYPNGINSTGTVTKGAGDGTVNIDSLRVCQQWKDQGKLVGGKSRTLN

SEQ ID NO: 170280 - protein, 144 aa, Heterodera glycines
MFKQLNEAEVARAMISRYWRDLYERAECDVVIVGAGSAGLSCAYCLATRHPHLSIAIIEANVAPGGGAWLGGQLMSAMVVDKEMEPFLDELAVPYEEGGPNFVVVPHAALFTATLLAKVLAQPNVKLFNATAVEDLIIKRQQQS

SEQ ID NO: 170281 - protein, 82 aa, Heterodera glycines
GFWRLFGHPLDFLKFSPSVDSSSNSVSVLIDALLHGLSSNAAKQSLNKLFAADQQQLMDEVHRNGPESVLDKIGGHVSVESN

SEQ ID NO: 170282 - protein, 170 aa, Heterodera glycines
MQFRNFRSLQLKNIKYLPFSKIFPGMSADKTGALFVGDIILAVNGESLVNARHDEAVRALKQAGKMVNLQVQYRRDLHLRRENMLHRLSWEESRVEALRSFGLKLAFVTRNPIEEEDPENRTIEIRSHSARHILTLRCSSATEADAWFEAIHSCADTLLTQALAQVNLIL

SEQ ID NO: 170283 - protein, 208 aa, Heterodera glycines
SPVPKCPVISGRKFFSSDAFNVDRNCTRHGGELVANVLKAHDVREVFTLCGGHISPILVACEQLGINIFDTRHEVNAVFAADAVSRLRQNIGVAAVTSGPGVTNTITALKNAQMAESPVILLSGAAPTLMKGRGALQDIDQLSIVKSMCKFTANVQNVGDIVPTLREAIAAARSDTPGPAFVELPLDVLQPYGKVLAETNFVVHADTA

SEQ ID NO: 170284 - protein, 96 aa, Heterodera glycines; identical to SEQ ID NO: 165959

SEQ ID NO: 170285 - protein, 162 aa, Heterodera glycines
GHIEPGSTFTLTMPNWGFDPFPLLRLLSTGQWLLIAVASEIIALAALFVFIKFNPHFRLYRSLAALAFVALIGKGEAVGTGFNSRLITNSDISSIHPTISSLRPTFSPKFSHFFTSLIYSKIVGPKTTGQQQKTAFPFINNSDLDKNLCPSNKRRATGDVYP

SEQ ID NO: 170286 - protein, 288 aa, Heterodera glycines; identical to SEQ ID NO: 163070

SEQ ID NO: 170287 - protein, 58 aa, Heterodera glycines; identical to SEQ ID NO: 165950

SEQ ID NO: 170288 - protein, 61 aa, Heterodera glycines
ILPNFNFSYVLKKLLCTILHYFLYESRSIFCHFFHLSFFHFLTFFSFSLSFYFNSKIFYLK

SEQ ID NO: 170289 - protein, 57 aa, Heterodera glycines
MDMNLTNGGDVVSVQQRQNGGVGPTSLSSFNSFRQPVPPPPPPQNRLSLNGTMLHRV

SEQ ID NO: 170290 - protein, 110 aa, Heterodera glycines
RKRGIEYRKKRGIEYRNDSFIILWKLLLVRGINSNILKSGSNNNNNNGKRRNFRHYVRALDTDVAFNKKFRLMNAKSTFMIQTLPSNPESLLRVIFGHCIQSSLDEAQRR

SEQ ID NO: 170291 - protein, 92 aa, Heterodera glycines
QSLICVCIVFKKTSLLPFFRLSVRQISAFVMRRSPINGKSTVHEKGRKSLIALHLGGVGRWCSSPLRRFRRFASSCFRSCFSCFFRSKYSWN

SEQ ID NO: 170292 - protein, 102 aa, Heterodera glycines
  unsure (1)..(102): unsure at all Xaa locations
FKLVDPPGCSDSARGKGQRRVDFDNXRQKDDFGREGEADGGADSQNVGQHEEGAESEQQCRRRRLRQVVLRRRRAGGGHGGQSMINQSDRRIRHCCVMKCSQ

SEQ ID NO: 170293 - protein, 130 aa, Heterodera glycines
DNASKKSTSDYPYTALSDQLAAISQQMDNNSVDPITKQLLKICVELLQQVQQQQTVISEQDLQLQHFKQQKMMEEAIQDHERRRSVVVMGLPESHKQKPSERVAEDRTAISCVLDELGIESPITVYRMGS

SEQ ID NO: 170294 - protein, 55 aa, Heterodera glycines
QDRLLPIANISRIMRRDLPTERKLSKHNTKCVQECITEFVLLITSQVSERCSLQK

SEQ ID NO: 170295 - protein, 149 aa, Heterodera glycines
MMIIGDQYGFYQLVLRKHACRLRYILHQLNGGQLSLEDLKRNIEYAALVLETAYMDETRRICDEDDDLAEVTPEAVPDEVREWLTATFTRQTVQSRKEKPKFKSVANAIRTGIFFEKIYRRTQSVLAPIPHEYLPFLRQVNNWNFDSFD

SEQ ID NO: 170296 - protein, 156 aa, Heterodera glycines
MSSRRNEYLDAKIYVGGLPEDATSEELDDAFHRFGRIRKIWVARRPPGFAFVEFEDARDAEDAVRALDGTRICGVKARVELSHGNGRGGGRGFQGKRGRCDDRYGRDRYDRDRDRRYRSSFSSSPSHLVALLLNSPLNSIFQSQPSHNAIHPISSH

SEQ ID NO: 170297 - protein, 69 aa, Heterodera glycines; identical to SEQ ID NO: 165920

SEQ ID NO: 170298 - protein, 179 aa, Heterodera glycines
  unsure (1)..(179): unsure at all Xaa locations
MQETHIVLGIASVCSLLAIIATVVTLPSLYSEMSQMNSKVRDGVEAFRVNTDSAWTDLMDVQVVVTPPSKPRDNPFNSIFRAKRXQLPGHCQCAGLQQPSXPPGPPGPSGPPGQPGQPGGAGQPGQPGQPGQPAPPGAPGQPGQPGNSGQPGQPGAPGQPGKDSGYCPCPPRSSVLAVK

SEQ ID NO: 170299 - protein, 158 aa, Heterodera glycines
LINLPTSPGPSFADRNANNEPRNCRNKPMETMKASSSSLCYKNSCFLSDLLSSTNRRGNLRLLESEPFADEAATEAETELLLFAELEQQMDEDGNKQKYPDEEMPCHSASSSAFSADNCHAQLPIFCGVCFAECAAFDSFALRRCEPFGATHTFCDDC

SEQ ID NO: 170300 - protein, 171 aa, Heterodera glycines
WIPRAACQDERINGICPPGALLIIIKDVTEEKYLINLPTSLGPSFADRNANNEPRNCRNKPMETMKASSSSLCYKNSCFLSDLLSNASRRGNLRLLESEPFANEAATDAEAERLLFAELEQQMDEDGNQQKHPDEQMPCYSASSSAFSADNYPTQLPIFCGVCFAECAAFD

SEQ ID NO: 170301 - protein, 129 aa, Heterodera glycines
MVRMADVSQDDILVVEGAIDNDQTLKNLVERTYNKFGQIDVLVNNAGSILQHQRSRQNSNSNNSTSSNNYGYDYTNGQNGAEEEDGGRGRYHGFRGFRRTSSSATAMTSRRTCSIFGALDNDFDFLFNI

SEQ ID NO: 170302 - protein, 170 aa, Heterodera glycines
  unsure (1)..(170): unsure at all Xaa locations
RIGTPSDHKPVLSTFRVQVKKVDRHEXAQFMSSCCREVDKRQNELLPQITLSNTEFHFSTVLFDQPSLGVLTITNTGQTPTHFSFKPARPEADRLEEWLTITPLSSFIDVGGAVEVTLQILVFDESACKVPKDGAELSSIIIVHLTGGRDYFIVVDAKYQREVKDLISFN

SEQ ID NO: 170303 - protein, 118 aa, Heterodera glycines
MCEWLMQSEGDDDWSDEEGTAAGPIEPCARFFASASQMVFHVYNEHLVPLVQQHSDGEPPRIRCRWPICDNTPRTLWSITTHLQDIHCTENALESAMLQRVEMGYHEYVYHIRQQFER

SEQ ID NO: 170304 - protein, 148 aa, Heterodera glycines
EMASVTDRFLMNWKGIPLGFGLVTSTTFHIFNNRWLRNRFNANAFESKETKIAEQMLQQRRRNELMLHFKMASYGAPVALGTLAAGGILSSLPKILRLPNSIGFTVCGFGLSIGAFIVGALLLDGPMYAYTEWVQQRTDKGTEKQKVE

SEQ ID NO: 170305 - protein, 101 aa, Heterodera glycines; identical to SEQ ID NO: 165910

SEQ ID NO: 170306 - protein, 324 aa, Heterodera glycines; identical to SEQ ID NO: 163052

SEQ ID NO: 170307 - protein, 52 aa, Heterodera glycines
  unsure (1)..(52): unsure at all Xaa locations
LASPPFTHRPXHPLITPPQLTPQLPSPSMSRPIFGHMSDDAFLFIYLCAPLA

SEQ ID NO: 170308 - protein, 161 aa, Heterodera glycines
GSSNFVILQLIKAADQLYYKDKTLYTAIKPELIRSDTNRPKDAEKHQQIQKSGKKTADDNSGKKAAENLKQNNVQQAKNGESKRSKLQEMIGQAKKTVENALGSSHGSLESHQNSIDLRQEVAEINSKCADLANLLNALEQRLRAVEELTEGIAKKIGYSS

SEQ ID NO: 170309 - protein, 132 aa, Heterodera glycines
KIGTGFKDEDLKSQFKEFQELRIDKPRSYFAFDPSLAPDHWFEPSVVWEVKAADMSISPRHLAARGLVDAEKGHSSSFPDTKNSFLGISLRFPRFIRNRADKKPENATSSEQIAEMYRNQDHIKNQKDGKVD

SEQ ID NO: 170310 - protein, 39 aa, Heterodera glycines
TFVSIKMPLFHSFFLILLFLNLFFQFIFLKALKVPRFLV

SEQ ID NO: 170311 - protein, 150 aa, Heterodera glycines
MAAKELFLAQQPDLFKPIQSINAVLILICLGSSTAVPGIGVLWFIGLCSLIVSVTATEFVYSSVLTLLCGVGFWLSFGFASHVPDNGHSAGYIFAGIFLVAQVACYAIPVLIIYDRSRTDGPAAAGHEQIANVHPFGVTTDGCEQHYQSM

SEQ ID NO: 170312 - protein, 163 aa, Heterodera glycines
QVLPQFVPPFLLLILLSSACPFSLAFSSDILPSVTNSTGIGNGTDATTDPTDTTGNSDLMTSATLPEETTAKEEEGTKPGTDGTARDGQGTGEPQKDGEGLKQDTGVSAADGNGTAEPPKEGDESPQESFACSVLCWTLIIVGGVFICAVGLTAFVLLTVHYQ

SEQ ID NO: 170313 - protein, 109 aa, Heterodera glycines
MVRSLFDICLASVCQRSLVFDADLSLLPCDCKQRLMEFFASHDQLNSELCFGLMSRPMFGRNLTRLCFYLSDQLNDSILEALASFNQNLRIISIVECPRVTDTGIVSVT

SEQ ID NO: 170314 - protein, 158 aa, Heterodera glycines
NKFKPYTELPDHGLFYVLEQMPTIVLYQDMTQWLKQNGYFASYNIPFFKKTSLISGFEQKGNEFYWFSWKSCPRAKIFARDQHKVVDLDSLTKLMRYNDYTRDPYSRCNCTPPYTAEAAISARGDLNPANGTFEIPGMGHVNHAALDYKGTGYKMFKK

SEQ ID NO: 170315 - protein, 155 aa, Heterodera glycines
QYSQWNCTGLRCRPTSKFVKTQSHRAVHLLTQQHVAAPVAAQRRVVAALLAAVVVATDAAAVGPVCQQSPGSRSATGATMMTTFVHDGTRKGGSSSSYEWSKMESKNDESRHHGIRPHRCSHTSLWSFCAAVGHQCRCTRRWPCPRRLFCRTILA

SEQ ID NO: 170316 - protein, 186 aa, Heterodera glycines
TIQILSSSSSSTGSHQTPLQGQISSSTDDGCPVQMKIAKPDLMAEDSLEFAHNEYPVVFKWHSDAQPAKHVYLTGSWDNWRKKIPLVKSTHDFSTIINLNPGRYEYKFLVDGKWMVDDTIAKTDNQMGSQNNVMSIDEADFAVFDALDKDLASSNAGEAMRSMNSTGAQPSQDTPNDRELERLREF

SEQ ID NO: 170317 - protein, 59 aa, Heterodera glycines; identical to SEQ ID NO: 165887

SEQ ID NO: 170318 - protein, 92 aa, Heterodera glycines
KLGQKVFSEIGLKKRRMGRIKFGELPEKRSARGKSPENRNYVKLAEKATNWWISHAKCHRQNPALFTKPFTCATLGLLYSVTNRRFSSNIKA

SEQ ID NO: 170319 - protein, 169 aa, Heterodera glycines
YGRISKLYVECFNEREKCLTVIGGGKMATALVHGLVSAGFIDKSEVNICSRSKETAFRWTTQGYQNAYTNDEFYSKVKKPRGIVIVAVKPQIFPGFLDELRKNGWLNFVGPEVLCVSIMAGIALDTFKQQLKLVGFNGHAARFMPNVNCLVSAGIVLVCADDCVPTEMV

SEQ ID NO: 170320 - protein, 215 aa, Heterodera glycines
MPTGSRVPLIVERRSDETEEDTWTVYPTAGICIKFKEAHFSAASSVSGPSTSKFFINLAHCTELPPPHRHAELDEDKVAQMVEEDPDAFRIPICVGELDRSAEDRSGEAVAKVDVLVNSEFFHKRISQSEFFRQLTLRIVFQAIEIKHSLRVDIGKQVILRNKKCIGELCAQRIRKRPMTTKEANGEGKVKETTDTKEEEDEEERTEVDQMLDIE

SEQ ID NO: 170321 - protein, 96 aa, Heterodera glycines; identical to SEQ ID NO: 163039

SEQ ID NO: 170322 - protein, 153 aa, Heterodera glycines
VIKMLRLRCPSRHFASSAASAMKARPTVEPVQQKISRLPTGFSVSSVELQIAKRTAEMQTLTTANCSSSFAADQACQLLAKGTALLSPHFQIGNITNKRTPQIVNSRWLTKEAALIGVNIEHDLLLDYAGPISQLMFAFRSGARFQQHDEAGL

SEQ ID NO: 170323 - protein, 140 aa, Heterodera glycines
MTYKEKPVINAETTENLEQERGHITRILSRMEVELDAWAAIMNGLQGPAREAEEALFTAFIRDDRHLTEWLEDAREMLAHIAAELADEPNQPIAAGGQQPAVAVNPPVPAVPFVNNAAFLGGANVQQPAAVANHANQPPL

SEQ ID NO: 170324 - protein, 60 aa, Heterodera glycines; identical to SEQ ID NO: 165870

SEQ ID NO: 170325 - protein, 156 aa, Heterodera glycines
ILLMDKENKKRKGTKRSKNPEETSKQREENQNKENDDEFIHPPRRRSARLIAISKPALSSDLSASAEDFVHGKGTKTAKSEVFGTDALFGVSSASFTSPFNSYLTSSVEPIKLSSDEATVSSNRSLTKRLNATNIQNAQSLGEGTSKATLPLSSDD

SEQ ID NO: 170326 - protein, 153 aa, Heterodera glycines; identical to SEQ ID NO: 164440

SEQ ID NO: 170327 - protein, 93 aa, Heterodera glycines
DSCAKQMVKTTKLSHLKKSRKRLKPLTGQATSSLASSSSTISTTSAHKQPFDCVDEARASGTLPTHSGRTLLRIDEDGNCVEIPMQRKPTSPV

SEQ ID NO: 170328 - protein, 50 aa, Heterodera glycines
PCQNRPDPWKTKDWPGAKQGSLSREVYGIGKSEEGIFREFPREIKIKLTE

SEQ ID NO: 170329 - protein, 55 aa, Heterodera glycines; identical to SEQ ID NO: 163032

SEQ ID NO: 170330 - protein, 62 aa, Heterodera glycines
KRLIFSYTHVYAADETAVWLDPGGGTCVAEKGSKTVTVLNTGHEKARVTVLLTARSDGTKMR

SEQ ID NO: 170331 - protein, 210 aa, Heterodera glycines
  unsure (1)..(210): unsure at all Xaa locations
TPTIVNNVSLDPQVSANFLHTAIEEKREDEIIHLVGPISNQDRLELARQFEPLFGEDVSSKLKNALSGDSNELILALLEPTSVXYAHPMHRAMCGLRTLKGSGLIEMLLSPRKRPVDEMTRACXTLYRHPLEKDIFGDSCGAFPPLLPSVCNYTRDKRWSSDPIXANMTARALVKXNQVESGGNESLFNQWWGTKFHSVAFDFEEIPRAA

SEQ ID NO: 170332 - protein, 200 aa, Heterodera glycines
MTTAVSNTNAQQPNDATVPEGVDPAFLAALPEDMRQEVIRDHLLQQQISQADNTTARVDADVPPVERIAAIMGMEIPEGMDPAFLAALPDDIFHEVVRDHQRQQELARQRRAQIQAQQQEANHAMVRHPHIHHRHFAMPRFLSRSIRPHTHRELPSTSAAAATSSVERTVPLLDKESISTLLVLFLLDQEKFDTVRLQKL

SEQ ID NO: 170333 - protein, 148 aa, Heterodera glycines
MTKKQVTIVGSGNWGTAIARIVGKTVQMHNSEFDDSAVKMWVFEEVVEGRKLSEIINEKHENVKYLPGKKLPTNVIAVTDVVEASKNADVLIFIIPHQFLHKVCEQLKGNIKKSAIAISLIKGLATFHEKDIGLRLISNEIATSLGID

SEQ ID NO: 170334 - protein, 191 aa, Heterodera glycines; identical to SEQ ID NO: 162208

SEQ ID NO: 170335 - protein, 130 aa, Heterodera glycines; identical to SEQ ID NO: 162209

SEQ ID NO: 170336 - protein, 197 aa, Heterodera glycines; identical to SEQ ID NO: 162216

SEQ ID NO: 170337 - protein, 176 aa, Heterodera glycines
NESLKNVCCTFRRCSPSPLRFGISSQRRRCFCLLRATLLFAEQRIRRHFWKKNRCAIIANGCQRMGGTAKNGNGKRGRGRDGGGTAAGGSRSDGGEWGGKSEGRADGEGKSNESTNDSPPYTSPFIRRLWKWPNGATIQTNEAVLLLSNPMSDEAIFGLTRPNNAKQRDHSQNTQL

SEQ ID NO: 170338 - protein, 101 aa, Heterodera glycines
  unsure (1)..(101): unsure at all Xaa locations
SGGESEGDGDWGEKCGHVCVGDGEEEGESGEEEWSRERRRERGGAESGERWREXERERERWRVESEREXEKEWMEERRERWGRERXERERESEREKSERER

SEQ ID NO: 170339 - protein, 84 aa, Heterodera glycines; identical to SEQ ID NO: 156507

SEQ ID NO: 170340 - protein, 104 aa, Heterodera glycines; identical to SEQ ID NO: 149575

SEQ ID NO: 170341 - protein, 106 aa, Heterodera glycines
FLTINFITIASIIIYHCHYHLSPLISALVLTFFFFLYASSVTSSCCCCCCFGACGWSHAYGSSGFGALFTLCVSVSERFASTQRLVAMVNSVLQFLVAAVTFAFVH

SEQ ID NO: 170342 - protein, 96 aa, Heterodera glycines; identical to SEQ ID NO: 168446
  unsure (1)..(96): unsure at all Xaa locations

SEQ ID NO: 170343 - protein, 156 aa, Heterodera glycines
DMEELWKQSQKIQTDNHELSERVSSLTRENNTLRTEHERILGDHNTLRTEHERILVDHNTLRTEQERILVDHNTLRTEYERLLQRQLDDFHYWILCFAFFIPPLSILATARNNGLSFPVTVLSALAATIFCAFLWIPGILFALAFYFGLRKNAKKE

SEQ ID NO: 170344 - protein, 90 aa, Heterodera glycines; identical to SEQ ID NO: 168444
  unsure (1)..(90): unsure at all Xaa locations

SEQ ID NO: 170345 - protein, 79 aa, Heterodera glycines; identical to SEQ ID NO: 162277

SEQ ID NO: 170346 - protein, 85 aa, Heterodera glycines
LFPLHLILRMFVSNSVFLPVSRFFHCRALSAVNLVVHPFVARKCAFLSTPSLSFPFRRQYSSLASATTTGASNDKPNTSDGSSGC

SEQ ID NO: 170347 - protein, 103 aa, Heterodera glycines
CIIIISINSFIFQFFSLLDLALIFRLFFGRFLLGTMVQSFFDAGRRHCGGNARGRSDGGTFGQLFAGHSAFLTNYNWSSHHHCWKHQSFNQQQNANYSEAIHF

SEQ ID NO: 170348 - protein, 118 aa, Heterodera glycines; identical to SEQ ID NO: 168439

SEQ ID NO: 170349 - protein, 58 aa, Heterodera glycines
IIPKMISSQMFFLALLFICASLLCLFTASSAASDDGLENENPSKNVRNFLAEFGDNGH

SEQ ID NO: 170350 - protein, 80 aa, Heterodera glycines; identical to SEQ ID NO: 140683

SEQ ID NO: 170351 - protein, 82 aa, Heterodera glycines; identical to SEQ ID NO: 132020

SEQ ID NO: 170352 - protein, 72 aa, Heterodera glycines; identical to SEQ ID NO: 164388

SEQ ID NO: 170353 - protein, 182 aa, Heterodera glycines
MNGQIINSDELKIVFTHKALHTLIAYYSDVAVPTGTTVNRDGCGLTKRRFLCPSVKTKEQMIFEIDFRISATIGEKIMFGKKHDGSTDDLREATRMILDMVNSGMFYDELGLREFTVAPPGPALKNKLDKFVDRKLNECVARVEKLVNNKKDEVKDLAEHLEASDGWHLNEEQIHQFFKRRN

SEQ ID NO: 170354 - protein, 163 aa, Heterodera glycines
MNDDIRDQPGTCSRIFSLIGIKYQYYLDRLTPYTAVRWTIAITLIVFFVWRIVAIQGFYIVTYALFIYYLNLFLAFLTPKIDPAVEYDEDDDGPVLPSSTNEEFRPFMRRLPEFKFWLSTMKSTLVAFGCTFFEMFDIPVFWPILVTYFIVLTTLTMKRQIMH

SEQ ID NO: 170355 - protein, 131 aa, Heterodera glycines
FSTNIFNFWEFVSLHLGPIFHILYLKNRAPSPVIISAKMRSKCVFLVIFATIFLLLNGGTSSKHKSAKSGVSLVQKSVTLASLLRQPSQTEVVTRTMSQQWEVQHDMYDYDHYPKDDGPKEKGSKNCCTIM

SEQ ID NO: 170356 - protein, 35 aa, Heterodera glycines
MPNPSTFFLRVRMKTGNRIRYNAKRRHWRRTKLKL

SEQ ID NO: 170357 - protein, 130 aa, Heterodera glycines
MSTIPMPPPPTQDEKDQQKKSQWKPLEIGNRMRTTSEDSAESFDAYGPEWEGKGRGIGNRREFSSPNMTSSGRRMSITERLFGRPVPQERRNSLGEEQMGQEKPKSIAENKDFKELMKRQRKILGDDEWQ

SEQ ID NO: 170358 - protein, 88 aa, Heterodera glycines; identical to SEQ ID NO: 168429

SEQ ID NO: 170359 - protein, 136 aa, Heterodera glycines
NTTFTAALISDGRAENQLEQKKPSQLHSLPFSMDFNGPALVSKFFQTEDGANGLKAALFRGHLLLGKTVRAPEGFAFYAVKESEHSQSEEGEMSTYNVVDSVPSMDVWEYDEPPESRKKCLQNALVALQVANDLAS

SEQ ID NO: 170360 - protein, 64 aa, Heterodera glycines
LKMYFVGVKNHTPKVVQPQKSDAIDNGTISPFGNGSAPRRKPGHWVPAPFFVNRDQTTKFRCSA

SEQ ID NO: 170361 - protein, 71 aa, Heterodera glycines
MTMITPSYLGDTIEYSSYASSLVPSSDPLVTAASVLEFALERELVSSFFFFFFFFLKKILFFPIYVNLLRT

SEQ ID NO: 170362 - protein, 119 aa, Heterodera glycines
  unsure (1)..(119): unsure at all Xaa locations
MRTFLFIAVVGLMLAVILENVNATGKNSPTKGKQSLDSPNHEKDHKNEHEKYEAAYFQTGSSGSPKKGKSPHADPKKAASHLVPVTPGKVXXASLKMVKKLCGAMMPTMNKPKAVEVDV

SEQ ID NO: 170363 - protein, 152 aa, Heterodera glycines
RRECREMPSIEMPPIRPTRFFVPRPFRHHLRPAAHFRSNVQKCPPFSPIRRPSLPHIAGDPGKCWRITSITSRTFLASFRPAKLLDCFPSVCVMSNTSSSVVGIAQLKNGQKPCLLTWAEGHGPWPMCWHFAYLAKPAASDVSHSGQMQADI

SEQ ID NO: 170364 - protein, 69 aa, Heterodera glycines
PNNHFYPFSYSNMAVTFADFFKVICAIILPPLGVFVETGCSIHLLINIILTILGYIPGIIHALYIIFQY

SEQ ID NO: 170365 - protein, 121 aa, Heterodera glycines
ALYKTLCKLGDNLVYPILPAFAKPAWNHPAGPKTVFFWSPTIKWVLVGAGLSDLARPANKLSIYQNTALMATGMIWTRYCFVIVPKNYYLASVNFFVGCTGLAQILRIAHYQYIHSEETSK

SEQ ID NO: 170366 - protein, 38 aa, Heterodera glycines; identical to SEQ ID NO: 145447

SEQ ID NO: 170367 - protein, 66 aa, Heterodera glycines
LPKKQSLPSLFDPPKLLVIILFYHNDQNGLWIIFENFLPKKLNFLFYFALKIYVIMCDQILTMDFL

SEQ ID NO: 170368 - protein, 101 aa, Heterodera glycines; identical to SEQ ID NO: 163337

SEQ ID NO: 170369 - protein, 114 aa, Heterodera glycines; identical to SEQ ID NO: 168422

SEQ ID NO: 170370 - protein, 81 aa, Heterodera glycines
MRATNGRLGNLVRSPLARNKYLNNGEAKMQRRHSSAGEEMPRAVQFDESSDQYRCLCGCFHVKTGTYLIASNLKMAPNLVP

SEQ ID NO: 170371 - protein, 149 aa, Heterodera glycines
MFCRCFPHSFLLLLPVLLALLSLFKCISASNHQPQAENVLLEELIQEIRKLNDRMEPALGREGNAEEEQMLEIKRSQGMVPSELWNRAGDKRAQLPFSGGIYGKRSPLPFSGGIYGKRSARNLYSSSLIFPTLNRQARAMPFNDGMYGK

SEQ ID NO: 170372 - protein, 193 aa, Heterodera glycines
QPKLYYFAGVRGRGEYIRQILKFAKVPFEEVSINIEDWPKYKEEMPLGQLPVLEVNGVKFSQSLAISRYLGETYGLSFNDPLERALLNMIVDQISDTQNSGAFKEWPMVRLDLVPCGDKAAFFREKIRPQLDGCASLVEKYLVEKGDGILLGKDKITWADIYAAEFFAKCIHFGEKDCLEAYPQIKSLIARVQ

SEQ ID NO: 170373 - protein, 117 aa, Heterodera glycines
MRRLPLTLAGTPPSRTIRLAFVTHALQGYPFNPCLMGTTVRASVHIRLPKISANHDDFKSICEELKLQIRGIHGEHSESAGGVYDISNKARLGLTEFEAVKQMYDGVKHLIELEKKA

SEQ ID NO: 170374 - protein, 71 aa, Heterodera glycines; identical to SEQ ID NO: 125602

SEQ ID NO: 170375 - protein, 64 aa, Heterodera glycines; identical to SEQ ID NO: 168228

SEQ ID NO: 170376 - protein, 118 aa, Heterodera glycines
LTQQMVRNGKAVTICDQMNMRKRNKSLADNQSIPLFSFVVDGGGRVFRQNIIHLLAQMERVLVRHFPEKCLNHFGTVLCCSYCSTSSRTLSINRLDSSKKHSGMGANALCSASARIIR

SEQ ID NO: 170377 - protein, 54 aa, Heterodera glycines; identical to SEQ ID NO: 164340

SEQ ID NO: 170378 - protein, 88 aa, Heterodera glycines
FLRQQFLSANKCNINGITSQQILHSENVKISSWSVEVFRFLCLLLLLLFSSYSGATVKRNFICGLFTWYTPFSETASAGLPFTVASYL

SEQ ID NO: 170379 - protein, 107 aa, Heterodera glycines; identical to SEQ ID NO: 164400

SEQ ID NO: 170380 - protein, 92 aa, Heterodera glycines; identical to SEQ ID NO: 164367

SEQ ID NO: 170381 - protein, 76 aa, Heterodera glycines
MVCVPCIILPVVLAIYLRFVQPYILRFMPQRWRIWFDSVLYPTCPVNKMETTNKSKTEKNKTDGEGETGKECEKDK

SEQ ID NO: 170382 - protein, 103 aa, Heterodera glycines
ALQISNTVFMLIVLATSLLLLMPSSSNAKVMPQLGFANAEQLMNDNSSPMGAGVEGEVMDKVEARLLGALELLQSYKEVPIVPKFTEKRKNKFEFIRFGKRRR

SEQ ID NO: 170383 - protein, 62 aa, Heterodera glycines
SWLASSFHAVSSPSPPSQSSATDADAAAGIGTVTRNVPEFVATIAFRIRAHLPLFLLLPFLF

SEQ ID NO: 170384 - protein, 105 aa, Heterodera glycines
MADLQKLSGADRLLLCRRYFHVGFVCLPLLWAVNAIWFFRYAFPSGANATAETAQIRRYVCWSATGALCWGLLLTGWLFFYNIQRSYGLFDWPEKITAVFPLGYV

SEQ ID NO: 170385 - protein, 128 aa, Heterodera glycines
LSDQCFHLFAADLLSVDQCCCCCCCCCCWYCWYCWYFFFSNSYFSPDPMCMCALQNHIGMRWPAMNCMYINPSSREQLPGCSGQSQIAQMKQLLCIVNFSTWTFSSKISIHVLQIWQNFFVGPVPKFI

SEQ ID NO: 170386 - protein, 70 aa, Heterodera glycines; identical to SEQ ID NO: 164434

SEQ ID NO: 170387 - protein, 69 aa, Heterodera glycines
  unsure (1)..(69): unsure at all Xaa locations
MAKKTKYLIVRLASVISGTKQIWVRERAAAEAAAILYDPXGKNVLFKEVEQVKGKDSFPDRVKKMYNIS

SEQ ID NO: 170388 - protein, 96 aa, Heterodera glycines
SLFHANVSVWPSDHSPSDQCHSIDRSSHQFCFFFGCLTCLPNALSFASFCCCCCCCCTPPAIPFPLLILFWLLMFDGLVLLLSEVVALGIGGLLMA

SEQ ID NO: 170389 - protein, 105 aa, Heterodera glycines; identical to SEQ ID NO: 164420

SEQ ID NO: 170390 - protein, 110 aa, Heterodera glycines
NQIKVDQEESTKLWDWPLQSHDELVSIYDGRDRWEVGLDTGFFTPNEIEVNRMGQNLFIHCKHDQREGMLGTTSREVQRNYKLPDDVDPKSIRSNITRAGILRITAQKKR

SEQ ID NO: 170391 - protein, 56 aa, Heterodera glycines; identical to SEQ ID NO: 168412

SEQ ID NO: 170392 - protein, 128 aa, Heterodera glycines
LKNKMRTNCLALSSLAIFYSAVFSAIGAPVEPSTKERAKHGVAAHYLKAEDEKLEKIKQMLEEQSPKMSPKGKQIATKFVEILLNKKLTYEEFRKEILKLDNETDAKTNDEFAKSEFAKQMSLIEKHS

SEQ ID NO: 170393 - protein, 111 aa, Heterodera glycines
VRSPFFILPFFSAIGAPVEPSTKEREKHGVAAHYLKAEDEKLEKIKQMLEEQSPKMSPKGKQIATKFVEILLNKKLTYEEFRKEILKLDNETDAKTNDEFAKQMSLIEKHS

SEQ ID NO: 170394 - protein, 129 aa, Heterodera glycines
MVVVLSALSSGTFPPHFSLRWHSLSFLLVFILLTVRFSADFTNCHSVPSLMAFDPTKLRRLLPIREFLSDDQLAFERAIRQPAGGVKWMRFGKRTPQGKWMRFGKRKMAIEGGKWVRFGKRAEEMQGEE

SEQ ID NO: 170395 - protein, 167 aa, Heterodera glycines
  unsure (1)..(167): unsure at all Xaa locations
MKPTFLMLISTCIIALVYASAEYDECEVCTDLFTEVMKKVDESGEKGEPAVKKMIIEHCKSVKGVDDKKEKLCFFIGAHPDSSTSVLGDIAKPLSFHKPPNKVCSQLKERDSQICALKYDKPIDWDSLVLEKMRLTQLKELLLKIGDSCKGCTDXVDYITRINELRA

SEQ ID NO: 170396 - protein, 136 aa, Heterodera glycines
ISLIVLGILLTNLEAFRQQTVGIRGRLMCGNQPLKDANVKLWNKNTLGSDDQLAANRTDNHGNYELQGGVGQLTKMNVHFKVYHDCDDGIKPCQRKVNFGVPDHYVERSGSTKKWFEAGTMNMEFKYPDEERSCIN

SEQ ID NO: 170397 - protein, 129 aa, Heterodera glycines
EFGIGDRFLLVLISSAIVYKIFPFSVFVALFSFIVASWIYFQYRQKQHWHNVGVPGPNTNILFGNTLKQFRTGVIEVDEEMFKKYGNSYGSFLFERREFCTKDPKMLRQIFIKEFSHFQNRYVILWMKI

SEQ ID NO: 170398 - protein, 59 aa, Heterodera glycines; identical to SEQ ID NO: 168407

SEQ ID NO: 170399 - protein, 47 aa, Heterodera glycines; identical to SEQ ID NO: 168406

SEQ ID NO: 170400 - protein, 106 aa, Heterodera glycines; identical to SEQ ID NO: 138111

SEQ ID NO: 170401 - protein, 77 aa, Heterodera glycines; identical to SEQ ID NO: 164406

SEQ ID NO: 170402 - protein, 113 aa, Heterodera glycines; identical to SEQ ID NO: 164358

SEQ ID NO: 170403 - protein, 151 aa, Heterodera glycines
HQIYQFDIKMVMFGYIVSLKNVQMPFIHFVSFVCLPLPFLLSLSLTLSVCLPLPFLHSLFHFFPSLFLSFPHFPIALHSFTAFFPHSAHFGAAGFLHSFLHLPLAHFTQSVAHLLFVFGHTLLHSSMIKLASLKEFNATTKIRQKRRKARE

SEQ ID NO: 170404 - protein, 106 aa, Heterodera glycines; identical to SEQ ID NO: 162285

SEQ ID NO: 170405 - protein, 134 aa, Heterodera glycines
  unsure (1)..(134): unsure at all Xaa locations
HIFQYTFEHEKAAIFRWEKERRSERVEEETEQTQQMRKQRQRHMEEKGTKKDGERERAEEGQRRTERRRDNTLNNPEYRNGECFKIESHSLPSSNVSKPNQPPHFASSSLLKPVPMSKSSSNSLHVGIASTXNG

SEQ ID NO: 170406 - protein, 76 aa, Heterodera glycines; identical to SEQ ID NO: 168400

SEQ ID NO: 170407 - protein, 84 aa, Heterodera glycines; identical to SEQ ID NO: 168397

SEQ ID NO: 170408 - protein, 105 aa, Heterodera glycines; identical to SEQ ID NO: 163825

SEQ ID NO: 170409 - protein, 105 aa, Heterodera glycines
NILRKWQSLHRKWQQLRNLNTSPAYTTKRTLSNPTTVVQTQEASLNQQKMWSLLNGPKRKCKSKNTVRSSLLRRNTNGQKWNRIEKKSKRRKCISFGLIKRSFDD

SEQ ID NO: 170410 - protein, 120 aa, Heterodera glycines; identical to SEQ ID NO: 164419

SEQ ID NO: 170411 - protein, 72 aa, Heterodera glycines
MIRSICAHIVTLYRQKIDVVVALEARGFLFGPIVALEMDVPFVPVRKRGKLPGSVFSATYVKEYGQAILLMY

SEQ ID NO: 170412 - protein, 183 aa, Heterodera glycines
SLSKGSLGVEGLAGLLMDTAKKSTKVPYEEKTDESTQKGQTQIGTSNEGDEGAKEGKTNGRSISGKKTTAKEHYLSKSRYMPGLRSNGSSSLSAGINRKAIAQPSQQSGAKQTTGGGILSSVQVTSLLLVRLANNRRMPIQMRTHWAIRRPQFQSVADRRTMPKQTTPSQPSEDGRIGRQNIS

SEQ ID NO: 170413 - protein, 42 aa, Heterodera glycines
AVDAQQIIELILCLILPPLAIFIHANSDCNVHVLISIVLWYF

SEQ ID NO: 170414 - protein, 81 aa, Heterodera glycines
MVVDISKMEPFSPPVSHALFPHLTTVLLSIGLIFTAWFFVHGVTSTKKTRNLVKELFIGTLASLFLGFGTLFLMLWVGIYV

SEQ ID NO: 170415 - protein, 100 aa, Heterodera glycines
CEMVVLSKLGSPLRPFSNDYLLCRFQAFRNYAIKKERPPPAKIQVPPPANETGHWKYERDYSYDLRYSNPINKYSSFTRFITLTATGHKELWALFALLML

SEQ ID NO: 170416 - protein, 160 aa, Heterodera glycines
IFLFIVMINALGCSNAQLKCRRDTVGTINGVGLKMNFSEEECESTYFWQSAYKYCYASHCLRGNEWLTHYGCAKSPEKGACSDNVEKEMKDLYGLAVSCSFCTIGRKMDDMSNKNFPLYNTTNVVMPPSGGADGDDFSFMSTTQQLTTSYNLSEIATIVP

SEQ ID NO: 170417 - protein, 77 aa, Heterodera glycines
NCSIFFSFQQMQLCCPYFSQQAKRPAQFVAPAANKHSSNPSARFATNFANSCSCIGVPTTSAKPKKAKRIKNDKISN

SEQ ID NO: 170418 - protein, 75 aa, Heterodera glycines
SDHCHSFRSIILYQSPNLFQFNTFSRGFSKINFASVIYSFNCDPSTINEIHFLFCCLRTLGKIAKKTQKTANRRE

SEQ ID NO: 170419 - protein, 147 aa, Heterodera glycines; identical to SEQ ID NO: 164360

SEQ ID NO: 170420 - protein, 164 aa, Heterodera glycines
MAQHQESLIRQNFAAETEAGINKQINIELYASYVYLSMSFYFDREDVALHNIAKWFKKQSDEERGHGTTFMKYQNSRGGRIVLQNVQKPEKGEWGSALEAFQAALALEKFNNQSLLELHNLASQQGDSQMCDCLEDKYLREQVELMEEIGKIITNLERGGKGLG

SEQ ID NO: 170421 - protein, 119 aa, Heterodera glycines; identical to SEQ ID NO: 168381

SEQ ID NO: 170422 - protein, 84 aa, Heterodera glycines; identical to SEQ ID NO: 168380

SEQ ID NO: 170423 - protein, 37 aa, Heterodera glycines
FGYLHRLKIKHKNWGPTRFGAPVSALVFRRSRFAPMQ

SEQ ID NO: 170424 - protein, 120 aa, Heterodera glycines; identical to SEQ ID NO: 164369

SEQ ID NO: 170425 - protein, 79 aa, Heterodera glycines; identical to SEQ ID NO: 168376

SEQ ID NO: 170426 - protein, 74 aa, Heterodera glycines; identical to SEQ ID NO: 127829

SEQ ID NO: 170427 - protein, 151 aa, Heterodera glycines
VIPSLLNCPARNLCDRLNHPDEIQKVEKYLKGKTLQTTYKNQLDEYKDFEYGGITRESARKQMAYNGFKNVTVDQHFYVRYRICLRYANNPCVIEKHRNGHERFYPLELVKLKYVDKNNIYLGQNFPKSIPLLDENNSKYNDNYYDSCRLW

SEQ ID NO: 170428 - protein, 99 aa, Heterodera glycines
TLTTTDVEETIKRIQSQKGVTGVIIMDNIGRAIRSTFDDDTTAHHAALLQQLCERSKNVVREMDTSNDLSFMRLRTKKNEIMIAPDKDYLIAVIYKKSR

SEQ ID NO: 170429 - protein, 88 aa, Heterodera glycines; identical to SEQ ID NO: 164350

SEQ ID NO: 170430 - protein, 108 aa, Heterodera glycines
HQSHLFLMGVASADDDSVPDPIVIKLGESLSLSQLVQKIEQLQNRTVRELLVTLRRRTYEMPVGPPDPNGDRFFQNGHLLVEDVVYNWVRKTRNSIHGIVQLHVIRNF

SEQ ID NO: 170431 - protein, 63 aa, Heterodera glycines
KKNSVYHSAGNKINSIPVKNQRSQILRNYSIPLSQAQNAIIRLAHEAYFSFCRESCRESTVSS

SEQ ID NO: 170432 - protein, 89 aa, Heterodera glycines
  unsure (1)..(89): unsure at all Xaa locations
KFCKQARKCGMRNYIEHFVTKIXTENPYCAIYVVPGRNATPVLRAEYSNGRLVHVNAKAFSTERVCLHMNNLRTRSGIPIYKFENSHFS

SEQ ID NO: 170433 - protein, 103 aa, Heterodera glycines
KMYKCHSFILHSLFHFFPSLFLSFPHFPIALHSFTAFFPHSAHFGAAGFLHSFLHLPLAHFTQSVAHLLFVFGHTLLHSSMIKLASLKEFNATTKIRQKRRKA

SEQ ID NO: 170434 - protein, 76 aa, Heterodera glycines
MTLRNDTPMPPDEELRVPHEISLSSPWLRAVAVYMGIACEKEAKEFMLLRSERDNDPNQFKKYRNNFVFDAFNPTG

SEQ ID NO: 170435 - protein, 116 aa, Heterodera glycines
MPKMDMTFHFRTSEFILLREWLPQSIFAYLFSLLAVLALSVAYELLRVFRAILFQSLLHFIQFFLGFSLMLVAMTYNVPIFVALLLGHSIGYFLTAPLYRHGLAEENRTGGDCCCS

SEQ ID NO: 170436 - protein, 146 aa, Heterodera glycines
  unsure (1)..(146): unsure at all Xaa locations
VGVPGPNTNILFGNTLKQFRTGVIEVDEEMFKKYGNSYGSFVFERREFCTKDPKMLRQMFIKEFSHFQNRYNAIPEREHAPKSLMRNILTVLRDDDWRRVRNRITPAFTTGXLKKLIPILCEGTEKLCKVLETENALKGKEVPLKE

SEQ ID NO: 170437 - protein, 98 aa, Heterodera glycines; identical to SEQ ID NO: 168355

SEQ ID NO: 170438 - protein, 174 aa, Heterodera glycines
SSQLVAADHHPLILPALITFVILLVSSVFFFIYRRFRQKPNIILFVGLSGSGKTTLFTKLINSKNCWDSFISLKENQFDSYATDNGQTLTLLDFPGSDSFKKTLCRKWLNEKRNSLKGVVFVLDSATFSKKDAAELLYDVLFESGNAVPVLIACNKQDIGHAKSHSLIKKALEN

SEQ ID NO: 170439 - protein, 77 aa, Heterodera glycines; identical to SEQ ID NO: 168354

SEQ ID NO: 170440 - protein, 93 aa, Heterodera glycines; identical to SEQ ID NO: 163960

SEQ ID NO: 170441 - protein, 111 aa, Heterodera glycines; identical to SEQ ID NO: 162343

SEQ ID NO: 170442 - protein, 94 aa, Heterodera glycines
MNQIKVDQEESTKLWDWPLQSHDELVSIYDGRDRWEVGLDTGFFTPNEIEVNAKCNVLTILERHLVHIVAAVVQLLIPVGMEQIQIHVEKIVKK

SEQ ID NO: 170443 - protein, 145 aa, Heterodera glycines
  unsure (1)..(145): unsure at all Xaa locations
MPSSSGSEKGNGRNGVRGERRRYYIDLRENRRGSFLRITQLETHSGIRNSVALPFEGIGQLHDALDSILEEYGEGFIEEEAELXHSQMIRADGKSFFFDPDHNSRGDFLKITELKSFMGVRNCGVLSVRAIPECAQRLVELYNDY

SEQ ID NO: 170444 - protein, 147 aa, Heterodera glycines; identical to SEQ ID NO: 168350

SEQ ID NO: 170445 - protein, 164 aa, Heterodera glycines
MGQALSEPITTKNSASCSNDRYFVGSSSMQGWRISMEDAHTHLLELPEDPSTAFFAVFDGHGGAQIAKYASENLHTQIAQSNTFREGRISDALVEAFLELDEQMMASEQISEQGGNDGAAGGWTSAEVGGEATERHRAKSWCGRYHRGCPCPSFTRWRRGIYAT

SEQ ID NO: 170446 - protein, 147 aa, Heterodera glycines; identical to SEQ ID NO: 168342

SEQ ID NO: 170447 - protein, 119 aa, Heterodera glycines; identical to SEQ ID NO: 168341

SEQ ID NO: 170448 - protein, 160 aa, Heterodera glycines
MAARSNTNKETLKNHQTSKTIATKKLVVQDYKNRLKDGIKSLNDNFECILGASKVNCDDATHRSNSAGKLGEHYAIRNEAIARAALLVKATNELKMLTNEIREFLTIRDFNFISNSISKAEEDFKKRLKQYENDYSALRMSISTMASEIDRELVENSLYR

SEQ ID NO: 170449 - protein, 92 aa, Heterodera glycines
MFGRQFHIVMADNSVAVLKYKRVPNRRILDFYHTEVPPDFRGQGFAEQLVRAGFRHCLDTRFSVYPSCTYVQKYIRDLATEEEKKIVVEKYY

SEQ ID NO: 170450 - protein, 121 aa, Heterodera glycines; identical to SEQ ID NO: 164393

SEQ ID NO: 170451 - protein, 47 aa, Heterodera glycines
VTQKRSADRPPPIIKNRFQTNHQIIPSIHTHSHLSIILYAKVTKLRN

SEQ ID NO: 170452 - protein, 116 aa, Heterodera glycines
RGSRLGPLSNDYVLCRVQAFRNYAIKKERPPPAKIQVPPPANETGHWKYERDYSYDLRYSNPINKYSSFTRFITLTATGHKELWALFALLMLSSSLAIGIVFYSLGKIEVWVDRST

SEQ ID NO: 170453 - protein, 67 aa, Heterodera glycines
PIKIVPIGGNRFISVDRFKGRILIGIREYYQKDGKWLPGKKGISLNQDQFNGLLKILPDVKKMISSA

SEQ ID NO: 170454 - protein, 98 aa, Heterodera glycines; identical to SEQ ID NO: 168326

SEQ ID NO: 170455 - protein, 231 aa, Heterodera glycines
  unsure (1)..(231): unsure at all Xaa locations
MSMNSLNMGKEVAKRWMGINNRRMAPFSLSPVDRMRQSVFRVRSRLAVNLLSEGLATFLLLLVGNGIGAQHILGGGKLDNYMQVCFGWGMLIALLVFATYHTSGGHLNPAVSLAFVSLGKLPFAHFLLYSLVQTVGAFFGSALCFHVYRESFEKFDAGIRTVGGPSGTGAIFCSFPDEHIGHLPAFVDEIVGTGLLLLFAXALIGPANQPPKWVPPIRFGVAIVPTTPSFG

SEQ ID NO: 170456 - protein, 54 aa, Heterodera glycines; identical to SEQ ID NO: 164391

SEQ ID NO: 170457 - protein, 138 aa, Heterodera glycines
MRLGILLFVFRISLNLIAKTNATYFYVRGELWCQGEPYVGAKIFLMEADTLDPDDLLGEERSAPDGRFEVRGGESEIGDEEPYLMVGHTCPQRGVPPDPACHFLTRVDLPNFLTHIEVPPIHLDGQYEFQHICGEDDV

SEQ ID NO: 170458 - protein, 263 aa, Heterodera glycines
RWKIHTILHFVPHQYAWVVERAGKFHRILEPGVHIVYPLIDEIRYRHCLKEMCIEIPQQEAITKDNVQLDLDAILYVQVVDPYKASYGVQEPEYAISQLAQTVMRAEVGKLMLDNVFHERANLNRAIVGGIKESCAPWGLICLRYEIRTMNMPPEIRRAMKMQVEAERKKRAAILESEGICEAEKNRAEGEKQARILRSEAQMQEQMNKSMGLAKAAEAEKIQRILQSEAEMQMKVNMAIGLAKSAESEKESRVILAEAEEQE

SEQ ID NO: 170459 - protein, 219 aa, Heterodera glycines
  unsure (1)..(219): unsure at all Xaa locations
MKNFLTFLAFFLIVPCFKADNEKNKAAPRVFAEHPGPKLVDETTRWSKCQADQNLTIYDFEVETLDGKFTNLEKYKGQIVLLINVATFCAFTQQYLDFNPMLERNRANGVPLTILAFPCNQFHLQEPAENHEILNGVMHVRPGDGWKPHSNLHIHGKLEVNGANAHPLFDFLRDSCPQTVPVLGIKESMFYNPITVSDITWDFXKFLIDANGVPRFRIH

SEQ ID NO: 170460 - protein, 107 aa, Heterodera glycines
CRVRPFLCSSHFYGVPHLKFVSFHPSPRRLSAAIGPLFGLCAGESGAKFDEKFSKMSKMSGDGGHSTARQMPSGCNLPTVPMGFGPGKMVCVKRKRTRQSRTDGRGR

SEQ ID NO: 170461 - protein, 37 aa, Heterodera glycines
ARVQCPKPCPPPPFLQNKREFDYGTNEPTIGTTNSTK

SEQ ID NO: 170462 - protein, 176 aa, Heterodera glycines
MGSSAFPPFCLFYKCSGLRVQEFLLRRMTDDKAFNGHFLCLLEHPPTYTVGIRQDEYSDEFAQRLRLLGAEFHRIKRGGLVTFHGPGQLIVYPVFNLRKLSADGKMNGIGVKRFVELVEETVIQTLECDFGMNGIGRTQNPGVWVGENRKVAAIGIQIRHGITSHGLALNCDTDLG

SEQ ID NO: 170463 - protein, 90 aa, Heterodera glycines; identical to SEQ ID NO: 168310

SEQ ID NO: 170464 - protein, 72 aa, Heterodera glycines; identical to SEQ ID NO: 168309

SEQ ID NO: 170465 - protein, 165 aa, Heterodera glycines
IHPFWNIGVLRTSDDKSLMNGQLALKGCEIMALYFGAHMCQRCREFIPVLKQFYDQLKKSPETMPFEIVFVPFDRSEDEFRNSLRDLHDDWLYIPYGSVHINSLAARFNIINWGVIPTLVVLKEDGTLITMAGQANVQHLSASEAMVRWRSIPNPESGFKDFSKF

SEQ ID NO: 170466 - protein, 116 aa, Heterodera glycines
MFINAAQLKRSASSSDWLTKMYRGGGAMAWMVTKKLCKSGNICCNSVHRSRYGIVTHNWCCCCGICCCSHWRSTVVAAWLRSSVPCNFDGKTICTKVMRNSKSFIGATTTKKLFRQ

SEQ ID NO: 170467 - protein, 150 aa, Heterodera glycines
MDGRQKKLKTVDFEILTREQLCVLCQAVLNKWKGQANKNEQHFREEILDSCSLIENPSEAKKCRDGVTDAKVARLRKEGTEEMCVAEGFCGKGEMKELEKKMERMEKRIDDRKQKFEKGLRIIPPVDLSPVKSVPGDKATNTTNRTMGGG

SEQ ID NO: 170468 - protein, 88 aa, Heterodera glycines
  unsure (1)..(88): unsure at all Xaa locations
YRFARRGTHLGARLQVRRVQTAEFAKIARIRPVALIQSSDAEYGRHFWPKCAIQSVLPLAFERAISHVMLCNLIFCFKKFCLHSLNIX

SEQ ID NO: 170469 - protein, 102 aa, Heterodera glycines
TDYFDLLKCLDFIILTRTNLTGLNSRAGRCAVCEMDKVSLSCQLACRSALFSPTLSRNKKQKRIEMVCHWGHGDEIRGDRGVLNCLKSTHHWLAQKHQQLNN

SEQ ID NO: 170470 - protein, 70 aa, Heterodera glycines
AQLLTMQSKKHINNVREQMIYTELNSSLKMRAAQIPTQKPRALFTKDFPGGGRYEGALGPGLMAPAGLTA

SEQ ID NO: 170471 - protein, 48 aa, Heterodera glycines
SIFYCDYFFFKIFILTFPFCHQFTPKVSLANFHCLFHVFRLCCVICDH

SEQ ID NO: 170472 - protein, 148 aa, Heterodera glycines
  unsure (1)..(148): unsure at all Xaa locations
XFHKIAPNNADFSVSPITLVHSFTHSSISSIGVLHFALNLFLGQNFDHFALAGDHFFATIDGKSNFETAIGCNKHVELLLAIHRQMFVLHHPQTVHKLIIQLINSNLNIVSPAKHFGTSKNRHINCLAIGTVNVAQKVGLPRERFRSE

SEQ ID NO: 170473 - protein, 86 aa, Heterodera glycines
FASVIGWGYSAVHSFNLLFYWTDFWTCVNFQADHTIVPLITFVLSLVLACSSIFEIVLHKFVLNDVDTESDNMGIHQKQKNGCAFV

SEQ ID NO: 170474 - protein, 133 aa, Heterodera glycines; identical to SEQ ID NO: 152027

SEQ ID NO: 170475 - protein, 98 aa, Heterodera glycines
GFAKGTDGTAKMHSMICCVVHRPPLARFARVNIMCGASPTSTASTFDRSTATESEWHWHSRVPRRITPLQKQSHYNLMVSLRYDMSEYLPHSISWGGG

SEQ ID NO: 170476 - protein, 56 aa, Heterodera glycines
SFLNRRGRSSSSNTKRDLARKDHFFPHKFLIFCGVSNLEDRIFFIICGPKSRNFTQ

SEQ ID NO: 170477 - protein, 146 aa, Heterodera glycines; identical to SEQ ID NO: 164346

SEQ ID NO: 170478 - protein, 93 aa, Heterodera glycines
ASPSTIIIINQMPQSERHSFGLKSARAQIFAFGQMGDSAGVFQPKLLQHIRRFTDADILFVFDQFTNRCLANRRPFGAHQFEQKATVLHVCNK

SEQ ID NO: 170479 - protein, 179 aa, Heterodera glycines
  unsure (1)..(179): unsure at all Xaa locations
LFRQLFEAKSFTXSYLLGCTKTRQALVIDPVIETVERDASLVHELGLDLKYVVNTHIHADHVTGSGELKRNKYFPKAISILSGKAGGRADLLVKHSDLIRWGDGLELEVRETPGHTNGCVTFVCHSNQMAFTGDALLIRGCGRTDFQHGNARTLFRSVKSQIFTLPPDYLIYPAHGKLN

SEQ ID NO: 170480 - protein, 126 aa, Heterodera glycines
MNIFTFIFIALLCQYHRSKHHINAGPLDAEKSPSNGEGIHKYEAEKLKIGEVAKLNHGETKTEMDEADGHRHSLPKDRGDIVHPKSQDGVCKIHEDVKLDFNDDIFGQHVSGEERPPVAEPMPMSA

SEQ ID NO: 170481 - protein, 53 aa, Heterodera glycines; identical to SEQ ID NO: 164219

SEQ ID NO: 170482 - protein, 112 aa, Heterodera glycines; identical to SEQ ID NO: 164356

SEQ ID NO: 170483 - protein, 36 aa, Heterodera glycines
VPYSSSVRGFLRFFGQFSPRCAGSKKKKKNSRLVLS

SEQ ID NO: 170484 - protein, 166 aa, Heterodera glycines; identical to SEQ ID NO: 161714

SEQ ID NO: 170485 - protein, 71 aa, Heterodera glycines
GWRTHQEDAHNCILSFGDECSFFAVYDGHGGSDVSSYLKKNFPDFLKEHNLLLHTTDGRSQRGIAQIICEI

SEQ ID NO: 170486 - protein, 153 aa, Heterodera glycines
MAKSIGKQSKASNSKSTPNQSKSNQPPSSPSSSSSSCMGCLSNTNTAGPIDSYLGKPVKNSIFTFYGAGGRGACGLDAGVPKMSAAGSGQLFKSDGQWKDACRADKQYMLDDPICKNICIKVDYNGKTLTVPINNKCPECPPNHVDLSIDAFN

SEQ ID NO: 170487 - protein, 151 aa, Heterodera glycines
MAKSSGKQSKASNSKSKPKPNQSKSNKPPSSPSSSSSSCMGCLSNTKTAGPIDSYLGKPVKNSIFTFYGAGGRGACGLNAGVPKMSAAGSGQLFKSDGQWKDACRADKQYMLDDPICKNICIKVDYNGKTLTVPINNKCPECPPNHVDLSI

SEQ ID NO: 170488 - protein, 82 aa, Heterodera glycines; identical to SEQ ID NO: 163783

SEQ ID NO: 170489 - protein, 101 aa, Heterodera glycines
RIRGFLVDINGVLFDTSLDGGKAIPGSIEAVKRLYELSCVRFVSNESSGTRGAICQKLHRLGFVGPQPEHIFTPAPVAVKYLRQHGLRPKLIVHKGLKVGL

SEQ ID NO: 170490 - protein, 80 aa, Heterodera glycines
ILLIGVLICIFIVKSFQFKLFLFPGLHVLVLINSDRDAHNVSIFDQTEGRRWTVPLGGDAIVTAIWKPKNDGGKAAKNAQ

SEQ ID NO: 170491 - protein, 73 aa, Heterodera glycines
RDFYSIGAKRGMQMGTISANHDSSVKFELISSDLSLFPIEFICCPIPILLNCLAQLPLSNMKKSSFGQSVNFG

SEQ ID NO: 170492 - protein, 124 aa, Heterodera glycines
MSSNGIITIVALFLVLFGTHITTQIGAMNRHRQQRSLGHPFTVDKQQHTAQNENLVGAYLSRGMFSCGAKYVGTLQRLKRIIEEVHADYSECQKSMKQMDENEQMAFGKGHGTERFAVIDELIN

SEQ ID NO: 170493 - protein, 88 aa, Heterodera glycines
FVILPQIVPLGSIDQFVNHRKSLCAVPFSECHLLVLVHLLHRFLAFRIVGMHFLNDSFQSLQCANIFGAAAEHSPRQIGAEQIFVLCS

SEQ ID NO: 170494 - protein, 221 aa, Heterodera glycines
KYYFSEKYLLFLVYSLPFGKALTEEQLGIRLRRKEEQTPRQLKEKSGRERPLPFLSDSQKTEEILNTAPVKIKDRLTGRRPCQIAYLDNREGAFALNVLTETATTKLTLGDHVKPLGKGNPGICAPFEPRICSDYLVSYTNPGPFASFAPHFDLTWATMSKRDSDLLLSCYGDRDNVTDATALRQMDSNVGTPTSDVGESMVNDLTDHEHLGTITSLGNTS

SEQ ID NO: 170495 - protein, 54 aa, Heterodera glycines
VIKGQSIQNKRSPSASNIPYNGHNCPTLELRHKTNGTPTSNPGTSLGSISQRHV

SEQ ID NO: 170496 - protein, 115 aa, Heterodera glycines
LFRFHVGRLRWWLLRRLWLRWVLRFTDHFGRRSADRRLSLSHLRCRRPLAALFKTTERKGRSAATTAVLPPILHSQRRTIRNQRIEHRISLKMALISRHNWHFNRTNEGAKKLKI

SEQ ID NO: 170497 - protein, 120 aa, Heterodera glycines
RNLWFSNNRNIKNSPLFHSHNNNYIVIEQLICPVVFPPRPLFSHPLHSFGRSSIWPIIRAVVASIWRPFPLLIVSFGTVHLCPHGTSIVFGFTTRPHFDDHFICSASCCSISNWPIRWPN

SEQ ID NO: 170498 - protein, 51 aa, Heterodera glycines
MNFYIIFFLVIFSTFFCQLLIVGATEKSGGVQCDEANGMEPFEYIPALWRE

SEQ ID NO: 170499 - protein, 57 aa, Heterodera glycines
MPALNGGDELLLRKKRQDEGDEAEENAGGENAENGNEENNGEGQNEENNNGEENNEE

SEQ ID NO: 170500 - protein, 48 aa, Heterodera glycines; identical to SEQ ID NO: 168261

SEQ ID NO: 170501 - protein, 118 aa, Heterodera glycines
KIHGFSGSGLAQNSRSNDKFRFKDSICLAINLFLSIKESLTYALLSAGLMLCADVTILAHISHRNFLHMDSDETLLLQWHVVPSTDPLLIGTIFAALILCSVVYLVDVWVVYRQRRWR

SEQ ID NO: 170502 - protein, 174 aa, Heterodera glycines
VDVGEIAAGHHVTPVDMTTATSKLQLEAAEVRNPANKPNWSSYLRSQLVPQNEYNFIIELEKAKNKQERDEALAKDKTNSARSIINLITEVAKDQLIRYVLTLFDDLLQEDKSRVEIFHDYARRQKRTIWSWFQGILTRNDSFIVNQMSAIFSKLACYGSVLMDGQELQAYFNF

SEQ ID NO: 170503 - protein, 115 aa, Heterodera glycines
MTGTTSATSSTNNTINTNNNNNNGNSTCVKGSSTTHTVTAPPSDISLTERMKHLLNTGNDADVHFLVGSDDKKELLPAHKLILKTASNVFEAMFRFDTENLKASGKDPHSEIKPV

SEQ ID NO: 170504 - protein, 73 aa, Heterodera glycines; identical to SEQ ID NO: 164437

SEQ ID NO: 170505 - protein, 58 aa, Heterodera glycines
MARHKNILRIHLIILSFANANASFLSLKVHFLLICPFFSFFCHYYFFETKNFNKILNR

SEQ ID NO: 170506 - protein, 90 aa, Heterodera glycines
DFLNIFNSHRSLKWPVNVPAAKTTNVVPLTAAEILVHHANAPTASAKSKRDSANPRGRDAVLREANGKDGERGEGEAERERGRERKKGPQ

SEQ ID NO: 170507 - protein, 153 aa, Heterodera glycines
LLQSFTHIFLMSFPCGDGWRQQIHPEEQLPQYEQKCDIEMQLDTLKQTVKANTKACAESAQRIEDLQSFRFYYLILAFFAFFILIMSAMFLYTRISLLSDRIYTQIGNVDNRIRDHLDTKSERLYAKIDALSAQVQRLGLAMATLSNGSHTTT

SEQ ID NO: 170508 - protein, 137 aa, Heterodera glycines
PTKMSNLFVASSAVVFLLLQLHFVVTFASSFEGAPPKANEEAMPTTGEQDGGAEFGGSKQKMARKMMRYNGNNFDKVSVLFIRREMALRKLQLQINVLEQQLANALSSAFAAGCPPSGVSSVSDGISHRRHLPMPRE

SEQ ID NO: 170509 - protein, 137 aa, Heterodera glycines
MSTSEEFKKQTIVPDVVTKAPEKRAKVVLDSGVEANLGNVLTPTQVQNPPKVTWEAEAGKLYSLIMTDPDAPSRKEPKFREWHHWLVVNIPGTEVDKGDVLSEYVGSGPPQDTGLHRYVYLIYQQKNTIKDTEHGHL

SEQ ID NO: 170510 - protein, 124 aa, Heterodera glycines
ISFILFVKAFGGGSPKKNKKINDGLAQRMSKLLSTGAYADVQFVVEEGDKKELLLAHKAILSHASEEFALILGFDTQNSSHSNGKISAETIKTVLVTDVTIGAFKVMLSFIYTEGLKGDKLSVC

SEQ ID NO: 170511 - protein, 134 aa, Heterodera glycines; identical to SEQ ID NO: 164357

SEQ ID NO: 170512 - protein, 68 aa, Heterodera glycines; identical to SEQ ID NO: 164352

SEQ ID NO: 170513 - protein, 71 aa, Heterodera glycines
FLSNPTLIKSRKLIKNDEKTTNLGKNCYNKIPILPITRAICCLSLISHWWHIASAYANAQNAWPSEQLGGH

SEQ ID NO: 170514 - protein, 46 aa, Heterodera glycines
TLPLLQFLLAVSFCFPSDPSDEFAVPFLPSMTHPQKAINSLIFLLP

SEQ ID NO: 170515 - protein, 219 aa, Heterodera glycines; identical to SEQ ID NO: 162410
  unsure (1)..(219): unsure at all Xaa locations

SEQ ID NO: 170516 - protein, 98 aa, Heterodera glycines
MTDQQNSIDGGWTEQNVNDEKIKSLASRSVAKINSESNDRFSLFPLEVGRSNCSKNQSNLADHANCATEDGQTARKTFLVTIWEKPWEQFEQITYKLE

SEQ ID NO: 170517 - protein, 117 aa, Heterodera glycines
MLSPFTYDPFNRRSLWPMTTIVGNVLSPFRQLERELDHFFDGMQPMLRDHVAQLNVSNKGDFTYKVDVSGFRPEEINVEVVGNEFIVNGEHREQNDSGFCYVARALKFAETNIGAWC

SEQ ID NO: 170518 - protein, 110 aa, Heterodera glycines; identical to SEQ ID NO: 164351

SEQ ID NO: 170519 - protein, 38 aa, Heterodera glycines
IQIVQNGSCELIRNKRKTKNHACRPISRIKMTFSFRVK

SEQ ID NO: 170520 - protein, 130 aa, Heterodera glycines; identical to SEQ ID NO: 163806

SEQ ID NO: 170521 - protein, 98 aa, Heterodera glycines
FKMTLNPPHLTLRGYEGHDYMGDTFKKTNDYAQTWFVPLMRGQSIDIRQIPGDDCGFFEDQSECVSRTKKNKRFWKIRDVRFKKWLRGETPHIFRTIG

SEQ ID NO: 170522 - protein, 76 aa, Heterodera glycines
MFLMEVNGEVHVQSSLAPSHQVVKRHCSCGGSWGGWGGGGGACCSCGQCGNMGGYSSGGCYGCMSGMGGCYCGKKK

SEQ ID NO: 170523 - protein, 124 aa, Heterodera glycines; identical to SEQ ID NO: 168234

SEQ ID NO: 170524 - protein, 133 aa, Heterodera glycines
NKSLSSTAVSSKEFWAQLLHRKTMVDHEKNKEVIHAISYLGKDPYFGYSVQHFGHSFYYSEEKTPQYAQQSFGRRVGRLYAKAQSHDPCKTQIRPKFAPPILQQRQSVGTGRANAEDIHGQLNRTDENWRNEI

SEQ ID NO: 170525 - protein, 127 aa, Heterodera glycines; identical to SEQ ID NO: 168233

SEQ ID NO: 170526 - protein, 144 aa, Heterodera glycines
YGQQQGQAYHPRGANPYQLQPGWNVPPPPQGQQPYNAQHFATITKRDLTSMLGIVFIATMCLALFGLVVIIVGMFTNVRILFVVYAAIGAFLFMIWLAIDIQMVMGGRTYEISPEEHIFASITLFLDIIQIFWFLLAIFGDRRN

SEQ ID NO: 170527 - protein, 143 aa, Heterodera glycines
QWRRAGLIKALLCGEELTWTIPDERERELMAWHEVGHGAFAAKDKDAIPLRYLSILPMYDSIGQTYCMPKSDAQTMSVAQVRAEISGFLAGTIAERMSYGSNKVTTSCSSDLKSAYQAEQQAQQNQDDQNHGGQEATDEEYCR

SEQ ID NO: 170528 - protein, 78 aa, Heterodera glycines
FFAPLKFYLSFHKFHLKFSPFSVFLWHPFIFGPLFLNWPRRLRLRRLPQHLLFPLKWRTVHNWHKGDFDEKQKAQNGA

SEQ ID NO: 170529 - protein, 51 aa, Heterodera glycines
LEKQRNSDEMNYLRQVGEILSRGTVRTDRTGTGTISIFGMQTRYSLRGSQS

SEQ ID NO: 170530 - protein, 68 aa, Heterodera glycines
RDFSHDDHINNAIGTNGDSKDASKRKDICRDFLNNICSRGGGKGIIREATQFFVCLINHLHKFNFLKK

SEQ ID NO: 170531 - protein, 45 aa, Heterodera glycines
LDSAEPYLQRFGGLDGESVLTWDRRKYLIVYRDIICCFIIVKISV

SEQ ID NO: 170532 - protein, 104 aa, Heterodera glycines
KSHHIFFVMTLRQSMIKCNKNTYCERVGNEQNTKHALHKTTDGTEAKGARAARVRSAPVQHGVDLAHDVHLAPVVPPGQVLLQLNERDAKITTDFGIQIKNAIN

SEQ ID NO: 170533 - protein, 48 aa, Heterodera glycines; identical to SEQ ID NO: 168215

SEQ ID NO: 170534 - protein, 48 aa, Heterodera glycines; identical to SEQ ID NO: 164339

SEQ ID NO: 170535 - protein, 58 aa, Heterodera glycines
LKYSLCVQSTFVGAVRVGFFPNNPSHLWSGLVFRQNIIHLLAQMKGVFVRHFPEKCFN

SEQ ID NO: 170536 - protein, 50 aa, Heterodera glycines
LKSNGIFIFKNNLLFQLLIALLGSHCPSAQLSKAFDCATSKVDHSECCRQ

SEQ ID NO: 170537 - protein, 44 aa, Heterodera glycines
FAFEQPISSFHWFVRFRDYVKVTGSDSGEIALWDIRSGKNELNS

SEQ ID NO: 170538 - protein, 49 aa, Heterodera glycines; identical to SEQ ID NO: 137744

SEQ ID NO: 170539 - protein, 58 aa, Heterodera glycines
HLETIDALDIYPTGATEEQKCRCREKRKCMVDTVQTLLNENDKYTFRLDQYRKSLLYK

SEQ ID NO: 170540 - protein, 61 aa, Heterodera glycines
NLSPEVLCLGRGRRSLCSFFGHRSSFEEQLIKLQSQIVLIMTIFVSHINDEIRMLLKRSLF

SEQ ID NO: 170541 - protein, 54 aa, Heterodera glycines; identical to SEQ ID NO: 168200

SEQ ID NO: 170542 - protein, 61 aa, Heterodera glycines
ISFYLVTPILRPMKRAIGRPLVRTNRKEFSETAKCGQKEVLFEQVKILDRANSLWTDITKK

SEQ ID NO: 170543 - protein, 52 aa, Heterodera glycines
ERTSLEFFFFFFLTVSSAFAVFIGICLHQLRVTAPFGTSVGVVRQWLRRNNS

SEQ ID NO: 170544 - protein, 71 aa, Heterodera glycines
FGYVLGHHTVTVESDSIYQPHVTECHFLILTTPALLQQIKNPPPNRIRATNGQSLAFMRMYRNSVILFENV

SEQ ID NO: 170545 - protein, 71 aa, Heterodera glycines; identical to SEQ ID NO: 164335
  unsure (1)..(71): unsure at all Xaa locations

SEQ ID NO: 170546 - protein, 64 aa, Heterodera glycines
HLFRILSQKIMEKFVSIPMLSSVLNPAISANFRVRLAFLTHSLCFVRQFVHFYGRSFDQKMNSS

SEQ ID NO: 170547 - protein, 47 aa, Heterodera glycines; identical to SEQ ID NO: 167945

SEQ ID NO: 170548 - protein, 23 aa, Heterodera glycines
ERELVSRFFFFFFFFFFFFFFFF

SEQ ID NO: 170549 - protein, 39 aa, Heterodera glycines
SRMGLTHPILVLSLAKRRMNVEQCGKTHGVMQRGEKVGH

SEQ ID NO: 170550 - protein, 64 aa, Heterodera glycines
EKERDILVSLASKHRTVPYDVLMNALKIANEREFEDFIIESIYQDIIQVNDGFEIMMENLGSNH

SEQ ID NO: 170551 - protein, 129 aa, Heterodera glycines
GHKRYTGEVMNGMGMDRHLLGIRLLAAEHGVPLPELLGSDIYQRLLHFRLSTSQLPTSHVLPMGFGPSAPDCYGVCYNPQENHIFFIITAFNDCAETSAERFANALERALLDMRDLVDWAGRLKGRAKL

SEQ ID NO: 170552 - protein, 121 aa, Heterodera glycines
KPVNKMRTQSIFSIFFLLLIFEVINSFPSKSSESGEPPANGAEVAQSRKKRQAEEVTTEEPPSETNDAEGAEDHQSAAAGNGKAPKNKGKKNKSDSSDSSSSSSSSSESDEKKKLKKKNKH

SEQ ID NO: 170553 - protein, 112 aa, Heterodera glycines
VEYAMLENEIGVKMDELQGLIMALSYSHQIVNMAVSMPEPVYQADELAKRGKNNFAALKRFKPNQVPKKEHRLLAKKGAKRQTISLVDHHELNRILSYWGDGTFVLSNRFTA

SEQ ID NO: 170554 - protein, 133 aa, Heterodera glycines
ILSFHSLLQNDFSHNVINHYQIFKVSSSFRSSASSSLLLRLLQRISAGATFPPLRFFRSAAAPSADGGGGGTPSPAADGSAAARAAEGFSSAASEDGDESSAEHWTTKSAKRARDRTKRILNREMPIHNRIFL

SEQ ID NO: 170555 - protein, 71 aa, Heterodera glycines; identical to SEQ ID NO: 168177
  unsure (1)..(71): unsure at all Xaa locations

SEQ ID NO: 170556 - protein, 159 aa, Heterodera glycines
  unsure (1)..(159): unsure at all Xaa locations
MNPNGFFFVLAVLFLVKVDFLQCKYNEPMARQVLQKHASQFQQHCKNARRGSAVAKCCSAIRSIMGRFTSQKKAMNQMLAKCKAGTTPSEAQQMRRKLEGSNKLKDCGQFKSQIQHKFSELKQYCNNGAENEEENDEXSEREREEERVXKREEQQNSNH

SEQ ID NO: 170557 - protein, 159 aa, Heterodera glycines; identical to SEQ ID NO: 164321
  unsure (1)..(159): unsure at all Xaa locations

SEQ ID NO: 170558 - protein, 37 aa, Heterodera glycines
LICYLRPITLKVPLKLIIKRQFKKIKKKITNYSKKKL

SEQ ID NO: 170559 - protein, 91 aa, Heterodera glycines
  unsure (1)..(91): unsure at all Xaa locations
ERIGKALDEXMPRNGQNESFGGDRITQTECHNKVMHTFNKICFNFSKSPYVMKYAKTLANLCERRADTAQIVAILNEQCAQMEKMEVHYSN

SEQ ID NO: 170560 - protein, 74 aa, Heterodera glycines
MMPSSPSSAPLGANVLVTGANRGIGLGIVKEILKTDGIVHLLAGCRNPSQAEVLWEFVDSFCFVELKFKRFYFN

SEQ ID NO: 170561 - protein, 171 aa, Heterodera glycines
LILPFIKHSPLNVFLHRMNGLFEVAISDYYLFVFARLILTFIRLAFSAHLRPTGIRSFIISTFISFIAGVLFRNRCGPFAPSVNGVDLVRFFGVGENQFCAPNNSRGNECPFLPGKVRHFGKCRRLLCRTRETSGWPLSAKLGKKLGRKTEKSPTEMKMNSLRWKGFEFQW

SEQ ID NO: 170562 - protein, 94 aa, Heterodera glycines
MAMEFRRDIVMGAIVRLILRAFCDFVRVQKFSRHGFEQLQVDFAYVRQKLWYFVADEHMLNTCIEDIVTAAVNQCAQPKLLDPSVVRRICEEMQ

SEQ ID NO: 170563 - protein, 175 aa, Heterodera glycines
NIHDEFPSYVKACKKYDPTWEPKFVYCIVDKNHNKRFFVKGQQQVENTAPGAVIDSKVVRVDIHEFWMQSHVPLKGTSKMPQYIFPVNDPKANNNELQGFLLALCCSWQIVTLAPALPTPVRQAKELAKRGRANFGELKRTPQYIPRAENQQIDYQQLNRRLCYNGHIFADTRNA

SEQ ID NO: 170564 - protein, 93 aa, Heterodera glycines
  unsure (1)..(93): unsure at all Xaa locations
LPKIHVEASTVASILLAGILLKFGVHGFSRFLISFLFSNSXFFLFIAIIGLFFCSLICLIQRDLKSLVAFSSVFHISIILIIYLVFFQLGKNG

SEQ ID NO: 170565 - protein, 53 aa, Heterodera glycines
AKLYQSLSLIIIINSLSFLPFVLFLHSFIFSCFSSHFALCLFPNISSSSQFSP

SEQ ID NO: 170566 - protein, 82 aa, Heterodera glycines
MSSLQPLFFAALFLAVFCLCAIAMPAQPEGPMFEGGQHQAEAGRAKRWSPYYYGAYGGWGGAYPYASSYYGHAYPYYSGYWW

SEQ ID NO: 170567 - protein, 66 aa, Heterodera glycines
MPFLRSLLLPSVLLLLLLLLLSVSLCSAGVFAPLRMKRQFDWFGNSMGAAWRRLRRRMGVRQKMNR

SEQ ID NO: 170568 - protein, 59 aa, Heterodera glycines
LAAFFNHKVLSTKNHILTFFRLLPKNPPPFGEIADCHSLRCSVPLSFVVLIDDNFLLLL

SEQ ID NO: 170569 - protein, 134 aa, Heterodera glycines; identical to SEQ ID NO: 168168

SEQ ID NO: 170570 - protein, 137 aa, Heterodera glycines
  unsure (1)..(137): unsure at all Xaa locations
MRTFLFIAVVGLMLAVILENVNATGKNSPSKGKPSPDSTNHKKDHKNEHPKYEAELIYEQGKPSPDSPKYDSPILAGSSGSPKKGKSPNADPKKAASHLVPVTPGKVXEQSLKMVKKLCGTMMPTMNKPKAVVVDVE

SEQ ID NO: 170571 - protein, 138 aa, Heterodera glycines
  unsure (1)..(138): unsure at all Xaa locations
ERSMKALIGTVDELNKAVNAYGKYTVEKQKYDTMYNNLMQKRQTENEARQSRXGEPPLTMEDIKRQLKQPQMQTKYGMLDLLLNALDTDAFTTYQIQTTNENVAKLHLSQAVSAQPVVAASSAAIGTSAANAPNLERK

SEQ ID NO: 170572 - protein, 33 aa, Heterodera glycines; identical to SEQ ID NO: 164326

SEQ ID NO: 170573 - protein, 46 aa, Heterodera glycines
HFIVNFCTTLRPSLSKSPPKRRHSNPIAQIGMFNRTELRNVRKCSD

SEQ ID NO: 170574 - protein, 155 aa, Heterodera glycines
MNCSFFLCLFTVQLILLNFAVEGREDDELKRKKRNTDVDVLGLVNIHAPSRKNVNVDVGGEERDRNDKLVNVNVQGHRKNVNVDVGGGHYNEGKVVKYERDGERGREVNVDVRVPKVKVDVDREDGYPKKKRVHLKVLDKLRKYDSEESGERKRH

SEQ ID NO: 170575 - protein, 177 aa, Heterodera glycines
MFVQLVLLAIVGITFVDAAAPPFGQLSVKGTNLVGSNGKPVQLIGNSLFWHQWYPQFWNAQTVKALKCNWNSNVVRTAMGVEQGGYLSDANTAYRLTAAVIEAAIAQGIYVIVDWHAHEPNADKAIEFFTKIAKAYGSNPHLLYETFNEPLDVSWNDVLVPYHKKIISTIHTIHKNN

SEQ ID NO: 170576 - protein, 118 aa, Heterodera glycines
  unsure (1)..(118): unsure at all Xaa locations
MRTFLFIAVVGLMLAVILENVNATGKNSPTKGKQSLDSPNHEKDHKNEHEKYEAAYFQKNRRQTVQRKSPHADPKKAASHLVPVTPGKVXXASLKMVKKLCGTMMPTMNKPKAVVVDV

SEQ ID NO: 170577 - protein, 115 aa, Heterodera glycines
  unsure (1)..(115): unsure at all Xaa locations
MRTFLFIAVVGLMLAVILENVNATGKNSPSKGKXSPDSTNHKKDHKNEHPKYEAELIYEQGKPSPDSPKYDSPILAGSSGSPKKRKIAECRSEKSCFTPCASNTRESMMSKVLKW

SEQ ID NO: 170578 - protein, 100 aa, Heterodera glycines
LTVRHNYNNKLIYFPCYSVLLRCSFPAFESLLFSGSFFPNFQRYPFPSRIKLFAFNLLYLFCSFVRCFSEALKAYNFPSSSAITYVLRIPMKILLKIIFI

SEQ ID NO: 170579 - protein, 195 aa, Heterodera glycines
  unsure (1)..(195): unsure at all Xaa locations
IPRTELFRLAQRYILAGRKVAVVKYALDTRYDESHACTHDKRKMEAISATKMEDAFEEIWHFHLCXFKDIVKYAQELANTGKTVIIAALNGDYRQEPFQNVAMLIPLAEKIEKLSAVCRCGQSASFTFRMSEXHELEMIGGQELYRALCRTCVVEYNHVKQQLLNGLKKNGNVSLAKKRKASDATAHPTLRIDTV

SEQ ID NO: 170580 - protein, 97 aa, Heterodera glycines; identical to SEQ ID NO: 138551

SEQ ID NO: 170581 - protein, 86 aa, Heterodera glycines
QIAEIIAKKPKYCGERFAKMRDKVCRWPGEQQPCLQLHHSIKERVRTKCCAEGCSLEEMKEEMCCMTDACLRRCYPGKGYRLGSVY

SEQ ID NO: 170582 - protein, 31 aa, Heterodera glycines; identical to SEQ ID NO: 168161

SEQ ID NO: 170583 - protein, 131 aa, Heterodera glycines; identical to SEQ ID NO: 164066

SEQ ID NO: 170584 - protein, 124 aa, Heterodera glycines
EMRQFLSFLKRKLTTQYGRSLIVVPFWLVHLLADQSVFTNYCFCYAPPSSVVFQNCGQNMPPPPPPLPPIPWPCCILLMLPPPPPIPGSHAVASHLAPSPAHLSASPIASKHSMNLNWCHEEKH

SEQ ID NO: 170585 - protein, 76 aa, Heterodera glycines; identical to SEQ ID NO: 164102

SEQ ID NO: 170586 - protein, 138 aa, Heterodera glycines
MSHNQRGNANANMGPPQGVGSGSSAENSDSSADNQPSNEQWEAAFNSIGDFSHFVRQVFHSVVHGMAVNDSSIFPPNSAQARNGFTANSRVTGFTPSIVNPPLSHESDELFMNIGAVQGLIAMPIPPRENAPQNQHHP

SEQ ID NO: 170587 - protein, 88 aa, Heterodera glycines; identical to SEQ ID NO: 168159

SEQ ID NO: 170588 - protein, 367 aa, Heterodera glycines
  unsure (1)..(367): unsure at all Xaa locations
FGRFLLDVIGRCGFSLDLDTFDEENIFVKQARTIFDFTRKGQKLRMILGVFFPCVSLLYENITGKSFAFAMDEEFFMEMMSDLYEKRRADPEAKEKYADIFQLLMNAVDDEEFTISADDAEIIHSELRSNEQQQKQQGKASDQETELFAQSFIILIAGFETTGATLSFAAYMLAIESEIQEKLREEVIDVLGENEMITYEHLKRMNYLRAFVQETLRMFPVAPKMNRVCNSDCVINGVPFERGDLITXPIYVIQHDETFFPDPFKFDPTRLLPEXKAEIDSLAFLTFGLGPRNCIGMPCAEFQMQVALALIVRRLRFSPGPNTPDSEISAQIALFGNASHRTTTCCASRKNLNLKKQSPSTIIFFNI

SEQ ID NO: 170589 - protein, 110 aa, Heterodera glycines; identical to SEQ ID NO: 164128

SEQ ID NO: 170590 - protein, 73 aa, Heterodera glycines; identical to SEQ ID NO: 164050

SEQ ID NO: 170591 - protein, 90 aa, Heterodera glycines; identical to SEQ ID NO: 168156

SEQ ID NO: 170592 - protein, 102 aa, Heterodera glycines
MIRLPFLSLALAFSAVLLVLCDDLPCPTDPSSAPLPPGCPPPPADADCAPPNGTPPPGAPPPGTPPPGTSPPCRRQRGGPAGGGVGAAQHPPNGPPPTTPKP

SEQ ID NO: 170593 - protein, 81 aa, Heterodera glycines
IHETVDPICLFCSFFDTFARYLLVSYLFITLQFVFFIFLRYFLIDLHRYRYVINEFIHLSIISALYVFPTYLSLITRKRIE

SEQ ID NO: 170594 - protein, 91 aa, Heterodera glycines; identical to SEQ ID NO: 162303

SEQ ID NO: 170595 - protein, 56 aa, Heterodera glycines
HLQRTSRRKLADEIAAVIKRDRSRSASRASLERISREVRHKFAHYTPQKKKQQLPR

SEQ ID NO: 170596 - protein, 40 aa, Heterodera glycines; identical to SEQ ID NO: 168151

SEQ ID NO: 170597 - protein, 99 aa, Heterodera glycines
PFLPPLIHSLLSSFSSKMATSAKIFVLLFVLLTVALLVEQATAQWGLLLPVLRQTRGRVRPPGQCQRKRRRARGRRRARDVQILKKGGRKKRSKSDRID

SEQ ID NO: 170598 - protein, 65 aa, Heterodera glycines; identical to SEQ ID NO: 168150

SEQ ID NO: 170599 - protein, 94 aa, Heterodera glycines
INKMSPLRFLAVLLLICAMFSFNNLGLANGEESKDSQVALRPDVAAVQPGPRRCSRSPWLLWRWWRLLRWRLGKKEISSQRRKEGCRQRLIIFN

SEQ ID NO: 170600 - protein, 95 aa, Heterodera glycines
DEIIKVLREEIDEQHRVHGTRVKVWRERIDSLEQMLISQQERAEADKWSQNGQMKEEGIKNREKQQSEKVLFICEKCLNAFPRYGYLYAHYSNCN

SEQ ID NO: 170601 - protein, 65 aa, Heterodera glycines; identical to SEQ ID NO: 164053

SEQ ID NO: 170602 - protein, 110 aa, Heterodera glycines
AVPVPMSVPAKLILLLVAASLVADFVLGMDEQNGAAAGKSSKTPTDPNDKLPKNAEKSNAPMKLTNTKKIDQDKLKGVSKEIKFGDTPPAAATGVPSKKPNSNKNQRGGS

SEQ ID NO: 170603 - protein, 74 aa, Heterodera glycines; identical to SEQ ID NO: 168144

SEQ ID NO: 170604 - protein, 100 aa, Heterodera glycines
KVSSTIGRKSPKAMEMKGKIGRRKSNRRRKRKRGNDQTDSLCCDGISYKYPNYPSPLFYGMPSTDRHFVHNFFTFTMKYTHIQYICIQNKQRIEKKKKKK

SEQ ID NO: 170605 - protein, 118 aa, Heterodera glycines; identical to SEQ ID NO: 164058

SEQ ID NO: 170606 - protein, 105 aa, Heterodera glycines
HFVRLPKAPPIIHKPSTNNNNMEIPSSNYPPPPPYDSSVLIQQPNNPSPNSPMMEKGPAATTAGICASHRFNTNRPSGEWSGTWSPCSSVSLYRRLPSLCRTGLQ

SEQ ID NO: 170607 - protein, 174 aa, Heterodera glycines
PFNPCLTKENYVEMESKVKAVFEQLKGDAELGGTYYPLQGMTKDVQNQLIADHFLFKEGDRFLQEANACRYWPTGRGIFHNAKKTFLVWVNEEDHLRIISMQNGGNVGQVLERLIKGVKAIESKVPFSRDDRLGWLTFCPTNLGTTVHTSVHIQLPKISTKPNFKSSVDSEQLS

SEQ ID NO: 170608 - protein, 55 aa, Heterodera glycines; identical to SEQ ID NO: 168140

SEQ ID NO: 170609 - protein, 53 aa, Heterodera glycines; identical to SEQ ID NO: 164311

SEQ ID NO: 170610 - protein, 80 aa, Heterodera glycines
LVLCTFPHSQFGLHAGENIAVSVAVKDKRCFDRLVVQIERKSTTEKFDVLQCRKCVFNSCWLGSRTLHDQRTYLTNLRSY

SEQ ID NO: 170611 - protein, 74 aa, Heterodera glycines; identical to SEQ ID NO: 168063

SEQ ID NO: 170612 - protein, 170 aa, Heterodera glycines; identical to SEQ ID NO: 164310

SEQ ID NO: 170613 - protein, 83 aa, Heterodera glycines
GCCCWRSHCAESGWLKAGVDGTKHCGTRSRHSCPGRQSCGQSLASSLSTAVGDRWKEMPNLGGVEKCRNFVANPFHICSLFFF

SEQ ID NO: 170614 - protein, 184 aa, Heterodera glycines
SKNKLFVNGHFTKDLSEDEQEELKQYQEQLDQFKSKVKTYLEERQKQFRNQVARQGGAEAKEGGTQLKKPEPPKKPSFCSDKATTQYVFDGCSVQGDNVYIGDTFVRKLSPDEQKELAQFDQKFTAYQKAVTAGFRKQVEEMFGQHFSTLFNASNLSPSTADKQQAVPSSNSKLTPTNAENNRH

SEQ ID NO: 170615 - protein, 76 aa, Heterodera glycines; identical to SEQ ID NO: 168133
  unsure (1)..(76): unsure at all Xaa locations

SEQ ID NO: 170616 - protein, 139 aa, Heterodera glycines; identical to SEQ ID NO: 163805

SEQ ID NO: 170617 - protein, 72 aa, Heterodera glycines; identical to SEQ ID NO: 168124

SEQ ID NO: 170618 - protein, 148 aa, Heterodera glycines
  unsure (1)..(148): unsure at all Xaa locations
MQKIRVANPVVDLDGDEMTRIIWAGIKEKLILPYLDIDIKYYDLSIENRDATDDEVTVDAAEAIXKKYNVGIKCATITADEARVKEFGLKKMWLSPNGTIRNILGGTVFREPIICKNIPRVVPGWKKEIVIGRHAFGDQYKATDIVVP

SEQ ID NO: 170619 - protein, 81 aa, Heterodera glycines
GGLDPMHSLPSAFCIFTFGILFPPPPKAPRLSAVFNIGPKPTMRWVDFVIGNDIYVTKALKMLCARKKRTQNKCDAKKGAF

SEQ ID NO: 170620 - protein, 123 aa, Heterodera glycines
  unsure (1)..(123): unsure at all Xaa locations
AGSERQAKINATGDRLKEASKINLSLSTLGNVISALADXESPHVPYRNSKLNRILQELLGGTAGPTVGAEQPLGKDDKINVSLNAFVGSWQWRRASEHSKQNSATLRSSTAHCRRSPRGWANG

SEQ ID NO: 170621 - protein, 128 aa, Heterodera glycines
MNMPPEIQRAMKMQVEAERKKRAAILESEGICEAENNRAEGEKQARILRSEAQMQEQMNKSMGLAKAAEAEKIQRILQSEAEMQMKVNMAIGLAKSAESEKESRVILAEAEEQEQVIVSRGLACAIET

SEQ ID NO: 170622 - protein, 134 aa, Heterodera glycines; identical to SEQ ID NO: 164087

SEQ ID NO: 170623 - protein, 141 aa, Heterodera glycines
VEMESKVKAVFEQLKSDAELGGTYYPLQGMTKDVQNQLIADHFLFKEGDRFLQEANACRYWPTGRGIFHNAKKTFLVWVNEEDHLRIISMQNGGNVGRVLERLIKGVKAIESKVPFSRDDRLGWLTFCPTNLGTTVRWRLR

SEQ ID NO: 170624 - protein, 52 aa, Heterodera glycines
VYRFLKKKFNDKKCQLVNRSTLNLSPNGTSFSQHAHCGFLMSFELNEKLISI

SEQ ID NO: 170625 - protein, 130 aa, Heterodera glycines
DTKRRMANAEEVCPTYSEAFSHGNDDGSFCTITEFKRNKLETEARKNWDRFYKRNSDNFFKDRNWTKREIEQMCAKDMELSAPLTLLDAGCGCGNTLFPLAKFFPNWTFCGVDFSSNALSLLQQRAVQIG

SEQ ID NO: 170626 - protein, 54 aa, Heterodera glycines
KYRFFYLTNLRISTSLSFSVSISFYTSSVGQIKPNQIDSSNFTSTAASLASVTI

SEQ ID NO: 170627 - protein, 97 aa, Heterodera glycines; identical to SEQ ID NO: 168118

SEQ ID NO: 170628 - protein, 100 aa, Heterodera glycines; identical to SEQ ID NO: 162880

SEQ ID NO: 170629 - protein, 120 aa, Heterodera glycines
MSAWICPGFLLFFVLILITDHCPMTQAVTQPPYGQLAVSGKNLVQKSTKKAVALHGLSMYCSQCVPKFWVKQTVNKLKCSCNANVVRAAMASSFGGYISNPTAEYKKMTAIIDGAIDQGL

SEQ ID NO: 170630 - protein, 181 aa, Heterodera glycines
FVKEFNRDEPKLDILINNAGIMFYPRFTKTVDGHELTWQSNFLGHFLLTELLLPKLERSEEGGRIVNVSSSVHLHADSVDPEVVESPRRFGIIATYARSKLANVMHVVALTKRIRTNDSGSKVSANACHPGSVNTELIRNNFFRKYIKKAFAPIIWFVLKTDRDGAQTPLFLALSRQINGV

SEQ ID NO: 170631 - protein, 148 aa, Heterodera glycines; identical to SEQ ID NO: 164166

SEQ ID NO: 170632 - protein, 69 aa, Heterodera glycines; identical to SEQ ID NO: 164181

SEQ ID NO: 170633 - protein, 50 aa, Heterodera glycines
FFFFFFFFFFFFFFFFFFFFFFFFFFFFFFFFFKLKHLLSTNIKINNKCG

SEQ ID NO: 170634 - protein, 83 aa, Heterodera glycines
GTYTLFNFPRQNKRTSARKQINCLNKFPLVSKRMPFFTQCQRMNGRAFFGRIWRQQRRVQLNQPIWLIGGCSFLGRVNPLIKR

SEQ ID NO: 170635 - protein, 59 aa, Heterodera glycines
TITTKFQLFKGRFSIESKRLNGRMIPSSIRPSFLSSDAKRSGKVLATTQNRAYIRRNTW

SEQ ID NO: 170636 - protein, 132 aa, Heterodera glycines
GGNKSRIWQLGSMDPSGQRLDQLLGKESKSNEQKQRISSLFTSVHLFMPKPVVVLYGEELGLLSGKPTANKLANRIVYPWSNETFGNQSQGFFVFPQRTKNGDFESQKNDKHSPLALFKEIAKLREHSDFFS

SEQ ID NO: 170637 - protein, 96 aa, Heterodera glycines; identical to SEQ ID NO: 164303

SEQ ID NO: 170638 - protein, 114 aa, Heterodera glycines
MKLSIILLLSLAFCALIIDAYPSGNGKDLEADNEKTEVKEEKMEKREAEVEEGKKEKKAAEEEVGKKEKRGSGGGTWGNGGRGNGGGNGGGGHGGGGHGGGHGGGNDSSGGGDD

SEQ ID NO: 170639 - protein, 50 aa, Heterodera glycines
FFFFFFFFFFFFFFFFFFFFFFLKALRYFIQIFTRHEKRCRAKSIKVVFN

SEQ ID NO: 170640 - protein, 76 aa, Heterodera glycines; identical to SEQ ID NO: 129528

SEQ ID NO: 170641 - protein, 171 aa, Heterodera glycines
GKVDGLDFDAFTRQLFDRWFGAYTRCGTCKNGKCSRHGGPLGSSGWEHVFSGEWRGEIVDGHHSWVRFYLQEKAGDIEYHGYYVKPRHGQFIGTIQYKWKQYLKRIGGFMIGTSPAFDFSLLTVCILTEPGDRKCKFQLKETPMFVSSFLEDCVIDGSFRHNFCIATAYPG

SEQ ID NO: 170642 - protein, 63 aa, Heterodera glycines
VPENVTMCIKQSRELDDLTKFESEKFFQLYELRKLIFLVTKNEFLYPNITNNCQSVCFCWWRS

SEQ ID NO: 170643 - protein, 129 aa, Heterodera glycines
ADSADDSLWSRYHDQNAMEELLEKVHSKCPNVTRLYSVGRSVQGRDLAVIEFSLHPGRHQILKPEMVSDARNGEPIANAVVWVRNVTDGDGQTAIKHPVTTWITGDYFRPLVSGCYQIAVEADGYEIGI

SEQ ID NO: 170644 - protein, 148 aa, Heterodera glycines; identical to SEQ ID NO: 164141

SEQ ID NO: 170645 - protein, 195 aa, Heterodera glycines
YYEDADGLNGNLSYGGTKGRKEWEENADPHSSDLSLYNIADGNKSSSGISSCCTTSSRSCEPPETNRFVLAKKQRHFKAGDEADPKMPTHRAQFPFMPRHSEQIELQKGDAIRILEKYEDHWCHGINLRSGKKGIFPEAHVVEIDLVDEICRSVLPDGTNHANKIERDTFYLTMLASIEVAHHRGNDVVMQAINK

SEQ ID NO: 170646 - protein, 40 aa, Heterodera glycines; identical to SEQ ID NO: 168110

SEQ ID NO: 170647 - protein, 169 aa, Heterodera glycines; identical to SEQ ID NO: 164297

SEQ ID NO: 170648 - protein, 130 aa, Heterodera glycines
PRRCPKYAIVRLTEGTNVLQFYQLLLDNGQEEVSFVNEMRENAFQLYEKPNNDTGKDEASIAADTGAGKKKLPDAEQKQTTDTKERKSPIMVDKGVQVIPERTIFASPSFSSSFRTQLPASPILRTAKKE

SEQ ID NO: 170649 - protein, 160 aa, Heterodera glycines
MNDENNGNQMNFFVQNLLFKAHTFCFSTFIPFIHSIHLIIRPPPPPRQIETSRSLFPYRRYYYSDYISNPYYWSSSYSYWGRYRSYLSDYDWPSYYNRWYDPYYDSYSRTYRYRSWLLDSMEDSLSKGLAQYRQGTINYNQLYRYRSYLSDYDWPSYYNR

SEQ ID NO: 170650 - protein, 39 aa, Heterodera glycines; identical to SEQ ID NO: 167895

SEQ ID NO: 170651 - protein, 144 aa, Heterodera glycines
GTYIASGDADGFLFVWKLEQEVLECEVQMLEEPATVRQRDADPEMDIPPNKENWARAFRSPIRHDGDVTGISWSPDSQMLASVSMDDSVAVHRADNGSSNGYFGRNERHKTSLLPPNRISINSPSSGRQFRNSSKSKTCHNYSY

SEQ ID NO: 170652 - protein, 36 aa, Heterodera glycines
LKNRHSFGHFEPQRILVPYNESEKGFYFYKTFNIFE

SEQ ID NO: 170653 - protein, 83 aa, Heterodera glycines
LFFRIRRIFYENYIKFIMAAAKAGITKYELIGVSSLSFLAVFVAILILLVQMLFHKAKMQTEEAECVHIDHQLQQKKKKNERF

SEQ ID NO: 170654 - protein, 151 aa, Heterodera glycines
KENYVEMESKVKAVFEQLEGDAELGGTYYPLQGNVGQVLERLIEGVKAIESKVPFSRDDRLGWLTFCPTNLGTTVRASVHIRLPKISAKPDFKSTCDGLKLQIRGIHGEHSESAGGVYDISNKARLGLTEFEAVKQMYDGVKHLIELEKKA

SEQ ID NO: 170655 - protein, 142 aa, Heterodera glycines
GESVENFFYNKMMNKIYATIHFLLLLTVIANKSTNCATNGQGTQTVKTADATHDEAGKISRDSSSSSDEDDSTTAASKMLLNEANNAFSKDNDEPINQQQKMRPEANFSVKYLPPRLNAAQIDNIAQQASSMITLRTLKHVK

SEQ ID NO: 170656 - protein, 42 aa, Heterodera glycines
VIPALKMHRIIAAVKKLVVGSVLAVRCTLCVLLVWLAFLPAA

SEQ ID NO: 170657 - protein, 84 aa, Heterodera glycines; identical to SEQ ID NO: 164165

SEQ ID NO: 170658 - protein, 87 aa, Heterodera glycines; identical to SEQ ID NO: 164187

SEQ ID NO: 170659 - protein, 42 aa, Heterodera glycines; identical to SEQ ID NO: 164080

SEQ ID NO: 170660 - protein, 66 aa, Heterodera glycines; identical to SEQ ID NO: 138838

SEQ ID NO: 170661 - protein, 51 aa, Heterodera glycines
GLPMFVTEYGCYSADGNEKANLEELKKWMELLDGYGISYAAWHVADIGEQS

SEQ ID NO: 170662 - protein, 99 aa, Heterodera glycines
MVYDIVRCVQVESKSIAAVIHHQNCGCSFSQHSDDGLNDPFAGHGQTAPFLDQLGHLGLAVRLRQQHINGRLNFGTEFHLFLKVSARFGGKRFTRTNAD

SEQ ID NO: 170663 - protein, 43 aa, Heterodera glycines
QICPRKWPNLATSSIFSRKLRIFRSGGADRRRREIFKNFKAIY

SEQ ID NO: 170664 - protein, 79 aa, Heterodera glycines
TPSSNFTHYRESWYVCRYRSGIPGTLRCYHLVVVGGRSRGSKLTYACMRRHSSSIVSPKFNSLAVVLQRRDWENPGVTQ

SEQ ID NO: 170665 - protein, 182 aa, Heterodera glycines
NSFFLKMLSAAFFMPLFFIAIGQFLQISDAIDCFSCASPALHNQWEATGLPEIPPPDRFAFHACDGTGTDYKPCADVCMEMLVAAGNEYGVVRGCMSDFYHGQTTSTNTDKCYFGGYPHNVTIYDPTNGAKTYSQLYVGVRYCSTVNGACNNKFMAKKEAAEGSGLLPKHFVVRPNKCQQRL

SEQ ID NO: 170666 - protein, 109 aa, Heterodera glycines
MTTNWEKLRKELNETEEKGKGNSKKRKRKVSENCNNKWKKMREEIEKNDQQKPEKAIETTISAKKILMAIDCEYVGVGLNGAENMLARVSIVDAEGIAVYDKYVKPTEE

SEQ ID NO: 170667 - protein, 127 aa, Heterodera glycines
FHWKEPKKAHPFPDSVVLKIPGPKYNSLVAQNGREEQTDNAMEEESSDYLIKAHTNEILFYKNFPRFDASLRLPKFYFGSDYSPSHNNGLIIMEDLSSRASSLLTLPGFDDAHVLVVIDELSKIHAI

SEQ ID NO: 170668 - protein, 64 aa, Heterodera glycines; identical to SEQ ID NO: 139695

SEQ ID NO: 170669 - protein, 132 aa, Heterodera glycines
QRLFPELQTLSRLSDPFESEFRSLRQFSQLPAIDVNETKEAFVVHADIPGFTREEIDISLNGPVLALKGNKEKKEEKKDETQHIQERIQSSFYRSITLPETFAPENVKASLKDGILEITIPKNAVTKKITIS

SEQ ID NO: 170670 - protein, 49 aa, Heterodera glycines
KKIGKITGMLLEMENAEIVLLLGDEEMLRLRVDEAATVLYQATCHKEAQ

SEQ ID NO: 170671 - protein, 284 aa, Heterodera glycines
CRLQATHLLARLFLLFALCTAFVSSLTAVAPPFGQLSVSDTNLVGANGQPVQLIGNSLFWHQWYPQFWNADTVKALKCNWNANVIRGAMGVDVASQNPIKDYQNLMYTLHFYASSHFTNDLGAKLKTAVNNGLPVFVTEYGTCEASGNGNLNTDSMSSWWTLLDSLKISYANWAISDKSEACSALSPGTTAANVGVSSRWTSSGNMVASYYKKKSTGVSCSGSSSGSSSGSSSGSSGSSSGSSSGSSSGSSSGSSSGSSGSSSGSSSGSGSASISVVPSNTWNG

SEQ ID NO: 170672 - protein, 151 aa, Heterodera glycines
PHLPTNSPISEANNYSYLPLLLLQKEDQKWKHPLKLTKYTGHMKPEFTKPFLIRFPNQFIAKTKEGTEQKESSQHRKVNRTGKEYTSHGAILVKRPSSSLTVMNMICLRRFTGKFAVNCQIFGAPLGSPISAADSSSPLLRPEERQREENF

SEQ ID NO: 170673 - protein, 141 aa, Heterodera glycines
  unsure (1)..(141): unsure at all Xaa locations
IHRAAGPQLLEECRTLKGCEVGEAKITKAYNLMPNIKAIIHTVGPQIGTEVSDEQCRQLRDCYANSLSLARDNKLRSIAFPCISTGVYNFPKXEASEIAIKTVRDWLTEGQNNEKLDTVIFCVFGDDDLGFYEKNIPQFIL

SEQ ID NO: 170674 - protein, 209 aa, Heterodera glycines; identical to SEQ ID NO: 163937

SEQ ID NO: 170675 - protein, 44 aa, Heterodera glycines
  unsure (1)..(44): unsure at all Xaa locations
TMITPSSNTPHYRESWYAXPYRSGIPGSTSSSSWPLIRLTIGGC

SEQ ID NO: 170676 - protein, 43 aa, Heterodera glycines; identical to SEQ ID NO: 164108

SEQ ID NO: 170677 - protein, 103 aa, Heterodera glycines
MTQSPRPAYVSSLLLLFPIFLLPYAVIFFIVVSFFLFLHFRNLPSPANNVANFFRGFHLGGHRGSPTNAPENTIASFKQALAEGVDFVEFDIGLTADGVPVLM

SEQ ID NO: 170678 - protein, 145 aa, Heterodera glycines
  unsure (1)..(145): unsure at all Xaa locations
EKAALRIAEGKWLNSGQTCLAPDYVMTTAEMKPKLVNALQKXQYSRMVNQLHFDRVKALLDKTNGKVLYKNGEPDRDDVFIPPVLVDTDLKDALMQEEVFGPVLPILTVKGLDEAMDVINDGEKPLGAYLFTNDQQKVDKFLNET

SEQ ID NO: 170679 - protein, 48 aa, Heterodera glycines
ANKMRQILKTNTFYTAKEFIVGYYPICHSFCPQSTLRPSPHFSACSHC

SEQ ID NO: 170680 - protein, 168 aa, Heterodera glycines
GKLVRLQVPVRNSRVDIIIIIMAANTTHYRGIFLFFLFSFTLRFRKMSNLNFEDNLQRVQVEIQWKQCLCNPIVAPFADVGSYPIFTDEFKGTRKCTLDVYVQGNLEHLDDKVVFLTVHDVGKTYLSCVDLANSPTLSPLVGQRAVFLHVSVPGQAPGAENFVGDFPS

SEQ ID NO: 170681 - protein, 141 aa, Heterodera glycines
TMITPSSNTTHYRESWYACRYRSGIPGSTSSSSWPLIRLTIGVSFTLRFRKMSNLNFEDNLQRVQVEIQWKQCLYNPIVAPFADVGSYPIFTDEFKGTRKCTLDVYVQGNLEHLDDKVVFLTVHDVGKTYLSCVDLANSPT

SEQ ID NO: 170682 - protein, 35 aa, Heterodera glycines
FILKDGKSIRSYFTNSDKNLLKNGMKLRKCGLAKG

SEQ ID NO: 170683 - protein, 37 aa, Heterodera glycines
FSSTFSQKILTRCCGVPKYSKNSVFNPVVLILHYTCF

SEQ ID NO: 170684 - protein, 82 aa, Heterodera glycines; identical to SEQ ID NO: 168075

SEQ ID NO: 170685 - protein, 38 aa, Heterodera glycines; identical to SEQ ID NO: 164252

SEQ ID NO: 170686 - protein, 179 aa, Heterodera glycines
MITPSSNTSHYRESWYACTYRSGIPGSTLSSWPLIRLTIGDFTPSYESSDLREGMALQNVQARARMVLAYLHAQLTLTKERRKGSLLILGASNVDESLVGYVTKYDCSSADINPIGATSKDDLREFLCHANANHKFPHLQSVIHSVPTAELRPLKDGQIVQTDEAEIGLTYRELSTFGK

SEQ ID NO: 170687 - protein, 48 aa, Heterodera glycines
FPQPHVPSDHIPIMSQYAVIPPNFQRSLPPIHHYGGSAHSGGFGAIGR

SEQ ID NO: 170688 - protein, 91 aa, Heterodera glycines
AAPVRPDSGMGSDELSGGWVGRFMCQTLDKYINSMTMLMSPFSSLSIVPVLPASLPASSVCKWVDFTNKHGFGVTFRDGTRSLLFNDQSSL

SEQ ID NO: 170689 - protein, 130 aa, Heterodera glycines
NPPNLNRSFIDGNNLQQFSRSASCQQFTTLAKTVPQQPTVSKDSPPPKQPPSAHDSGMGSDELSGGWVGRFMCQTLDKYINPMTMLMSPFSSLSIVPVLPASLPASSVCKWVDFTNKHGFGVTFRDGTRS

SEQ ID NO: 170690 - protein, 69 aa, Heterodera glycines; identical to SEQ ID NO: 168064

SEQ ID NO: 170691 - protein, 151 aa, Heterodera glycines
  unsure (1)..(151): unsure at all Xaa locations
GDRAQSPRNKPTGAIPRATLQSSVPVVGPSVTCQARRLYVGNIPFGSNEDAMLDFXNQQMHLCGLAQAPGNPVIACQINLDKNFAFIEFRSIDETTAGMAFDGINFMGQQLKIRRPRDYVAPTANYELLGRMPVSNIVVDSPFKLYIGGTP

SEQ ID NO: 170692 - protein, 88 aa, Heterodera glycines; identical to SEQ ID NO: 163701

SEQ ID NO: 170693 - protein, 163 aa, Heterodera glycines
NILSNYIINLISNKYCRFSQAVVACTAEDPQAQLVSIWDEAENRLISQIITRPLARSLQTYNLASPIFNTFWIGLRRVLVGNRYQSTWTNGSAAIFGNVPEITTAASRNTSPWAAGQPSGTNKYTDPTGAKEECVHMLNAEGRWNDARCEIQMTGAICKKSNF

SEQ ID NO: 170694 - protein, 107 aa, Heterodera glycines
QQPICSVSLNCECQVHPKKPRNNLCRRKTMRFRPNLAISIFYSLRIGFCETLNFSNPIPARSVPDHNLSFSFIKNLFYMLHRRHPSRPNCHHRSNDALPLDDLVPES

SEQ ID NO: 170695 - protein, 85 aa, Heterodera glycines; identical to SEQ ID NO: 164118

SEQ ID NO: 170696 - protein, 131 aa, Heterodera glycines
MRTFLFIAVVGLVLAVIMESVNATGNNSPTYGQTPPGSPKGGHGSNKSPTTPHSAGSPHGTQHGNQQNHATGQTPPGSPKGGHGNNKSPTTPHSAGSPHGTQHGNQQKNATGQSPPDSTKRETELIIEKVS

SEQ ID NO: 170697 - protein, 162 aa, Heterodera glycines; identical to SEQ ID NO: 164247

SEQ ID NO: 170698 - protein, 98 aa, Heterodera glycines
GQLIANFYIHFRNTLYDSEIFQLQFRFDDQYPFSSPEVMFMGENIPVHPHVYSNGHICLSILSDDWTPVTLAVHKMTDNPQTVFFFLGSQRLFRLFVH

SEQ ID NO: 170699 - protein, 113 aa, Heterodera glycines
HQKDPEVSWRNDATEGVLGKLTTTMGPCFCKGTAYLIHSFLNASHTGGIALIQSICRQIDQKKSPITTSECEKFESNLFGSTIKMAIELTGDDVMCELVAGPWSMSTFFLFLK

SEQ ID NO: 170700 - protein, 130 aa, Heterodera glycines
NNYNVIKSGNVKMTTTNPNYDKPLCLNGLSQYEALPSSLCNLNLCNFIGRNLCELLQQPGNHTVREMEQKAGWNATVVMPDSPRIFGIPFVDLFAGEFNFEFLLETEGKEIAHLEVPTNLAFVPIGMQNE

SEQ ID NO: 170701 - protein, 119 aa, Heterodera glycines; identical to SEQ ID NO: 164100

SEQ ID NO: 170702 - protein, 129 aa, Heterodera glycines
  unsure (1)..(129): unsure at all Xaa locations
SSHFVDGLGNKLKTAVNKGNHLILYRPKPLLFATVLXGLPVFVTEYGTCEASGNGNLNSGSMSSCXSLLDQLKISYVNWSITDKSEACAALTGGTSAANVGTSSRWTQSGNMVASQHKKKSTGLSDQLN

SEQ ID NO: 170703 - protein, 110 aa, Heterodera glycines
MEVSSMSEKNLKTPKAFRKGEHVPSEKMPGSNERTRGGGGSPSPFPSSSLPRGGRNPFKGISSRIVERVRRSLSRSKKNLSRDGGQSRDGTPSQNTIGIKAGGEVREEVD

SEQ ID NO: 170704 - protein, 67 aa, Heterodera glycines
ITPSSNTSHYRESWYAFPYRAGIPGSTSSSWPLIRLTIGARRSRGSKLTYACMRRHSSSIGSPKFNS

SEQ ID NO: 170705 - protein, 82 aa, Heterodera glycines; identical to SEQ ID NO: 167256

SEQ ID NO: 170706 - protein, 114 aa, Heterodera glycines
LALAHKMPQKCRHFGHFPKSLIDLPFLSPNYPNGSLTQRIITMPITEKRVPLRMKRRKSKIHSRNVLRTPLIIPELELMKKWRNSRRNDEKPRGELPSQGEDEAIKLLLLNDIG

SEQ ID NO: 170707 - protein, 141 aa, Heterodera glycines
MRTFLFIAVVGLVLAVIMERVNATGNNSPTKGQTPPGSPKGGHGNNKSPTTPHSAGSPHGTQHGNQQKNATGQTPPGSPKGGHGNNKSPTTPHSTKRETELIIEKGKPSPDSPNHKNDHENEISNLQNRATGQSPPDSTKR

SEQ ID NO: 170708 - protein, 68 aa, Heterodera glycines
AEKASLYLVGFVRVHFRFQVKEATFWMTDNEFRLDWSHLAPKSYNSMLNVSLFRHFILLLRHWFFPSF

SEQ ID NO: 170709 - protein, 179 aa, Heterodera glycines
RKINENSELHSKLFDVERRFDEAVTAFTRRIDELEKENDALKSLVSIPFDAEQRKEFGESENTAPGQTLQQTEANSEEKNAPSAVVPKTDSADDLLGCSSAFANESADLCSRKPSAIAKDEAVEEMAAEKYSTERIAALGESLRHAKGRATYYKQECEELLRKAICDQQRIEALEQNIF

SEQ ID NO: 170710 - protein, 114 aa, Heterodera glycines
WLNSNSIPISGISSSPAQCSINGKSYGKALRMEYRMLSDEQRDRFHSALLKLKHLYNGCSEYDRFAFLHSGIDKMPSAHGGPTFPLWHREYLKRLEFGLRSIDPSVALPYSESY

SEQ ID NO: 170711 - protein, 131 aa, Heterodera glycines
PKNEFKALDAFALSAHLRPGRHRCDCQARLHSLVRNCIGCGRIVCAQEGSGRCFYCGRLVCTREEKTIIERKDGEGLRLLRCLLNDLQADYFSLEHNPYLTAAEREAIGNRKEELRQLSLSVKRNILVDLD

SEQ ID NO: 170712 - protein, 254 aa, Heterodera glycines
SGSPGLQEFGTRLITNSQNSPAYCVLAYDHGDGVLREIIDHLGLLESGGLGAQQKKIGSETLPCHTLHLDTKYYTCDVPLLSCHSFVRLKSICAAERRSNLSVFAVLFCVTRQQLTEDFLALVSQYSASLEKAEVKALVLRDDQTEEATTSMNTNDEVLNKFALSRRIEIIKIGRKTTNVVDDDEEEGLVGIPRIVESIETVCWPNMKLKPNPVKFFEHPTPLEKYINSEACADDTAVFDMFPGCADDFAPGIA

SEQ ID NO: 170713 - protein, 128 aa, Heterodera glycines
MLEEPATVRQRDADPEMDIPPNKENWARAFRSPIRHDGDVTGISWSPDSQMLASVSMDDSVAVHRADNGSSNGYFGRNERHKTSLLPPNRISINSPSSGRQFRNSFLWVYCYCFILQLYKVFHDDQLF

SEQ ID NO: 170714 - protein, 32 aa, Heterodera glycines; identical to SEQ ID NO: 168047

SEQ ID NO: 170715 - protein, 92 aa, Heterodera glycines
PSLIMLGIFVATFFSSMSNLIGASRVLTRFAQDKLFGALLRPATIEVGSKRNPIISVIISWICVVMVLMIGAMNRIAKLSFPTNTGIISGKM

SEQ ID NO: 170716 - protein, 64 aa, Heterodera glycines; identical to SEQ ID NO: 164073

SEQ ID NO: 170717 - protein, 97 aa, Heterodera glycines
MNIFWQAPSDGEVQCCNEFNVSNSTHICFRYLAPPQLAQGGKRKQRINSVGPAGQKTIGQWQRRSPYSLNFPTLTRSLASGRTQKARSSNNFKQYTI

SEQ ID NO: 170718 - protein, 56 aa, Heterodera glycines
LNPGELDFKEGQIIQLDSQIDEHWFEGTVDGRTGFFPITYVEVIVPIPSSSTTAQQ

SEQ ID NO: 170719 - protein, 69 aa, Heterodera glycines
LIYRFVSFRSSTTVISIAATSVFSLSASRSLPFPDGYASMINAQKAKESNKIIENFIFKEDLLFLIGYN

SEQ ID NO: 170720 - protein, 141 aa, Heterodera glycines
GCHATEGNPFGPFWRYAGTHFVGEEYFGVKTGGFDTQRETIREKWATEFPAHSSPVLAFSSAPAAFPVRPDHRFIQRFVQWNDRIKQKAIEFASRNFGHGKAFVGIHLRNGRDWENVCQFLREENVMGKRQLFASGQCTGP

SEQ ID NO: 170721 - protein, 42 aa, Heterodera glycines
  unsure (1)..(42): unsure at all Xaa locations
AESWNCGRPPPPPPPPPPXARGAPPLPPPPYPPPPHPPFQIN

SEQ ID NO: 170722 - protein, 125 aa, Heterodera glycines
MKLFSMFLLLTLAFAAFAESSSSSSSESSESSEECSSEEGNPGTEPETTTVVDSDENCNATSDSPNDESSPVPSSDSPNDESSPVPSSDSPNDESSPVPSSDSPNDESSPVPSSDSPNDDSSSVP

SEQ ID NO: 170723 - protein, 128 aa, Heterodera glycines
MKLFSMFLLLTLAFAAFAESSSSSSSESSESSEECSSEEGNPGTEPETTTVVDSDENCNATSDSPNDESSPVPSSDSPNDESSPVPSSDSPNDESSPVPSSDSPNDESSPVPSSDSPNDESSPVPSSD

SEQ ID NO: 170724 - protein, 70 aa, Heterodera glycines; identical to SEQ ID NO: 164106

SEQ ID NO: 170725 - protein, 62 aa, Heterodera glycines
  unsure (1)..(62): unsure at all Xaa locations
XVINEYNQELIRSPKKIHFLLLSGNLVGELSNVPCPHPTGQSFPTFVRLLLICISIYRRKVR

SEQ ID NO: 170726 - protein, 34 aa, Heterodera glycines
YFFFFFFFFFFFFFEHKKFITGKYLQNEKALKLY

SEQ ID NO: 170727 - protein, 112 aa, Heterodera glycines; identical to SEQ ID NO: 154158

SEQ ID NO: 170728 - protein, 25 aa, Heterodera glycines
GSMFTEGISEGVIIRKIFINELKIN

SEQ ID NO: 170729 - protein, 180 aa, Heterodera glycines
FNTFWIGLRRVLVGNRYQSTWTNGSAAIFGNVPEITTAASRNTSPWAAGQPSGTNKYTDPTGAKEECVHMLNAEGRWNDARCEIQMTGAICKKAAQSVGSSGTVVSSAVVFPSSAFDLCNPSVSQCNGFGWTISSGKCYKVIEGLMNGTQAVVACTAEDPQAQLVSIWDEGENRLISQII

SEQ ID NO: 170730 - protein, 121 aa, Heterodera glycines
RSFSYHFSLLFLPISLFFLHHLFQSFCFALIDPLLKLHSQILAHSFCEPGSVAQFLKHLSLVQLRRLIRLCSFIRPLTSEGKALTTAIWEGCSNERSTERRSRTAKKSFVNISKLKITGRV

SEQ ID NO: 170731 - protein, 60 aa, Heterodera glycines
MASKIKPLICPSILNTDLSDLADECRRLMAAGADYLHLDIMDGHFVPNLTFGHPLIECLR

SEQ ID NO: 170732 - protein, 131 aa, Heterodera glycines
YVELDELNKNGADGTRAKLEYSMRDAFGGLDAQTLDAHIQKAKRNGTVFDALIRHNHVMYEANNNWRLNATQRAVHLCALEFVDYKMFEQCLANDANTNDQIPAAIPLAIGGFAVPFLVTLSSILTLLLPF

SEQ ID NO: 170733 - protein, 88 aa, Heterodera glycines
KMKLHSATLSKRLFLAGGPSPFSSSFCSFCCRIRFRPVHSFPPLSESAVSCPPSSAFFCCFSAAVLFFSSSKMVSTASGNLKSEKQLD

SEQ ID NO: 170734 - protein, 78 aa, Heterodera glycines; identical to SEQ ID NO: 164096

SEQ ID NO: 170735 - protein, 148 aa, Heterodera glycines
MSFQQIFSTSAVLFGLVFITSTLSAPAPKPQNQQQHPAEKQPFNAYLNPGFDKRSFDSFTGPGFTGLDKRAAFDTGFTNYDKRAFDSFTGPGFTGLDKRFEPFDGYGFNGFEKRSFDSFMGPGFTGMDKKKRAFDSFTGPGFTGMDRK

SEQ ID NO: 170736 - protein, 119 aa, Heterodera glycines
GFNIETLEFMGWKLNCWDVGGQKSLRTYWRNYFERTDAVIWVVDACDVCRLDDCFNELHSLINEECLHGVTLLVLANKRDLPGSINAHEIEKILRLEKIKHHWRVYEASAYTGHGLLES

SEQ ID NO: 170737 - protein, 50 aa, Heterodera glycines
VCLDRCVSKYLEVHDRLGKLLTQMTQQDDRAVQQQQQNLAAAAQKMHINK

SEQ ID NO: 170738 - protein, 132 aa, Heterodera glycines
LQLTYFRNQGSFSLTYEASITRLFREGRTETIRSCTNESCDFVRAMLDPQQKNEERLRLLRLAAERHQNLTRDAMCGKGVDRHLFALYVVMRHLEESSPFFDKIFPPQYLLSTSQTPLNQFDSEQEGISMAQ

SEQ ID NO: 170739 - protein, 135 aa, Heterodera glycines
MSSGTVSPLRDVPLRLSDKPSLPFPSPRRLTNDCPSSPSPAPITLYLRLVSWVCSMGGLLFGYASSSINDLLPFIVREMRLGPAEVGVVISCFMVGAGIGGFVGGRLADRIGRKRSLVLFDALFIVFSVCTSLAP

SEQ ID NO: 170740 - protein, 117 aa, Heterodera glycines
LYALFDGHAGRRAADYCAEHFARLFVAVFKKYVPPKSAMSVFEKSIRKVFVDTYKGIDDGFLVEARRQKPTLKDGTTATTIFLLDKTLYCASIGDSKAIVCRHKSEKSTNIPLQITV

SEQ ID NO: 170741 - protein, 41 aa, Heterodera glycines
FFFFFFFFFFFLFFFFFFFFFFFFFFCSDFYNSTIIKHKKE

SEQ ID NO: 170742 - protein, 121 aa, Heterodera glycines
PRLPPGVPRPRPLPKPPRLAIPPRPPGGPLPPRPPRINDPPRTCGAPADLKPPEELPFIGPPASSPLPSAPFESPPPSLSPPPSNAFKFGLGSVVMPSMCVSLTLIGCSSSARTARTPATR

SEQ ID NO: 170743 - protein, 52 aa, Heterodera glycines; identical to SEQ ID NO: 164199

SEQ ID NO: 170744 - protein, 38 aa, Heterodera glycines
IALRSVIPEKGRCNETDHFRLDGKMWTRLSTTESANWK

SEQ ID NO: 170745 - protein, 42 aa, Heterodera glycines
GAWLSVQQLLTHLFFFDQHLSKYSNLMALFHLIIFIFSYCNW

SEQ ID NO: 170746 - protein, 121 aa, Heterodera glycines
IQTHQIHSTSSPTVNIMLRIALLISILALFGDCMDKGKRKLGGISINEPSEYRTKEKEAIATSRKGKEKVGEKISVMNTAERIEKMDIAQGKAKMDIDTNVKPKQNEESAPPKYVFIWSGN

SEQ ID NO: 170747 - protein, 111 aa, Heterodera glycines
YLIRSFHRSKTFAGAEQRRTTKNVVERVRLKKVPSGSEFESGALPLAVPSVPPRLAPKCRLIDISYSVELSCQSPPFCVSLPVVIGTIPLLPPNLRSNDQNVAQNNGTNGV

SEQ ID NO: 170748 - protein, 115 aa, Heterodera glycines
  unsure (1)..(115): unsure at all Xaa locations
MAKFVAIALLSLTIVSMAPAKTGKSQTADEVEGFRNMNIGDNNKVDAGKEPAAAKXNDQLMGMSVEKFNEELAVLLPKANTFMENALSFINEQMEKNGIATGAAGDSCSTGIPAN

SEQ ID NO: 170749 - protein, 72 aa, Heterodera glycines
MLRGKWPNNWSPKFCVGKALEGSTVGIFGMGRIGRSIADKLSAFRPFEIIYHNRKANSEYGRIDGRLNDFAN

SEQ ID NO: 170750 - protein, 67 aa, Heterodera glycines
  unsure (1)..(67): unsure at all Xaa locations
LLRFPRQKVRLMAMIMQKENTNXRTTDRPKTKQNNRRILCFPFNSNLVQQNLNGYRWKGKRKIKILP

SEQ ID NO: 170751 - protein, 83 aa, Heterodera glycines
ILYFRKTQKISNAFVLSKKQSPNFSSTFIYSKSFFTHVRSCSATPAAGACLGLLGLVGEMSVHHLFLFIQSIKYLQKGISLLL

SEQ ID NO: 170752 - protein, 79 aa, Heterodera glycines; identical to SEQ ID NO: 164133

SEQ ID NO: 170753 - protein, 79 aa, Heterodera glycines
LDQVNGLPDMVFACNSGLFYRNKLYLSHFRHAQRIGEQRHFADFYKGLGLELYGADCAEVFEGGGDAFFSDERTLWAGW

SEQ ID NO: 170754 - protein, 86 aa, Heterodera glycines; identical to SEQ ID NO: 164069

SEQ ID NO: 170755 - protein, 72 aa, Heterodera glycines; identical to SEQ ID NO: 167942

SEQ ID NO: 170756 - protein, 160 aa, Heterodera glycines
MPNSGVQNHYRKRVAYYYDSNVGNYYYGQGHVMKPHRIRMTHHLLLNYGVYRHLDVYRPFPASLEDMTRFHSEEYMDFLRSATPETLKQFNKQMLKFNVGEDCPVFDGLFEFCQLSSGGSLAAAVKLNKQKAEIAINWMGGLHHAKKSEASGFCYTNDIV

SEQ ID NO: 170757 - protein, 126 aa, Heterodera glycines
MRTFLFIAVVGLVLAVIMESVNATGNNSPTKGQTPPGSPKGGHGSNKSPTTPHSAGSPHGTQHGNQQNHATGQSPPDSTKRETELIIEKVSNVVQNVDNKPRSAAASHLVPPTPGNSPTAHDSRHT

SEQ ID NO: 170758 - protein, 89 aa, Heterodera glycines; identical to SEQ ID NO: 148232

SEQ ID NO: 170759 - protein, 86 aa, Heterodera glycines
LIKINNRLFLPSPGGDRGEWMMECDRLLRINAVDASEKEAAFAGKRLTRLIRPRMDQRRRLFRCSGVVASASGVVSSSLRFTMRVG

SEQ ID NO: 170760 - protein, 66 aa, Heterodera glycines
FTKKLINDFFVLEALREREEEQIRLLESERDNFILFQTFYFDFTLLNFNSTAFNSRLNFKLNIYNK

SEQ ID NO: 170761 - protein, 97 aa, Heterodera glycines
SAEEIARKIGKVRAKRGWRRSHLPNKAQSQKTHFNNQNRRPSGDVVVLSLHWGGNWGYEISKTERDFAHQLIDSGTVDILYGHSSHHPKAIEVISRQ

SEQ ID NO: 170762 - protein, 50 aa, Heterodera glycines
FFFFFFFFFFFFFFFFFFFFFFFFFFDFSLLVTLRWETIEWIFNHFHHLS

SEQ ID NO: 170763 - protein, 83 aa, Heterodera glycines; identical to SEQ ID NO: 164236

SEQ ID NO: 170764 - protein, 71 aa, Heterodera glycines
FGNKSCFCFCRIGGDEDVVLAVRNALIAGETMFDSNIALLVQNAVQNVHFQKPPADDNADGGAEQMPMETT

SEQ ID NO: 170765 - protein, 146 aa, Heterodera glycines
MGQALSEPITTKNSASCSNDRYFVGSSSMQGWRISMEDAHTHLLELPEDPSTAFFAVFDGHGGAQIAKYASENLHTQIAQSNTFREGRISDALVEAFLELDEQMMASEQIREEMSGSTAVAVLIKDNFIYCANAGDSRAVASVDGR

SEQ ID NO: 170766 - protein, 150 aa, Heterodera glycines
PAVASTNAIIAGSCALEALKLASNISCSLNNYLNFANVEGICFNVVALERDPECLVCGQKSVQMYSVREDCTLSGFLDDLKDKYPLQNPSIRAGSTFLYEINTLMPEMETASRKNLCKTLKELHVTEDSELLVADEALTRSIVFRIEYSK

SEQ ID NO: 170767 - protein, 87 aa, Heterodera glycines
FLADLKPSIACRFSAQQSTNTVFDSLQKNNSLPKSFLQPLIANIISCRFKAIHCLPVSAQQSTNRVFDSLQKIIPYPKVFYNHILPI

SEQ ID NO: 170768 - protein, 67 aa, Heterodera glycines
RNQNANELAKNGVKQSNVSVRTQKSAYMSGQDYSLNLVYQQFLFEEAQRFQGHFPTPCHFPQCNRKP

SEQ ID NO: 170769 - protein, 73 aa, Heterodera glycines
MEKNTESLSKLDPSETLGTDALLQLKELREKGKLESYGRITDEKGEEKDSWGHALQKELDEKVRKFRELNRKK

SEQ ID NO: 170770 - protein, 221 aa, Heterodera glycines
MFVQLVLLAIVGITFVDAAAPPFGQLYVKGTNLVGSNGKPVQLIGNSLFWHQWYPQFWNAQTVKALKCNWNSNVVRTAMGVEQGGYLSDANTAYRLTAAVIEAAIAQGIYVIVDWHAHEPNADKAIEFFTKIAKAYGSNPHLLYETFNEPLDVSWNDVLVPYHKKVISAIRAIDKKNVIILGTPKWSQDVDVAAQNPDQGFSNLMYTLHFYASSHFGDGLA

SEQ ID NO: 170771 - protein, 39 aa, Heterodera glycines; identical to SEQ ID NO: 167973

SEQ ID NO: 170772 - protein, 67 aa, Heterodera glycines
MDCCHIINCQPYKSHFFKEEMDRDDDKTVERAVRESPIVVSESSATDGKIFKSFKFLKIFKNYTKNV

SEQ ID NO: 170773 - protein, 35 aa, Heterodera glycines
NESLIIQNINYHLDFFLSKIQHRRFVFPNEESECV

SEQ ID NO: 170774 - protein, 70 aa, Heterodera glycines
GKLVRLPVPVRNSRVDIIIIMAANTTHYRARRLMRTTGRGSLRPAVFKRLLSPALAHSNRRDEGDERRHN

SEQ ID NO: 170775 - protein, 85 aa, Heterodera glycines
TMITPSSNTSHYRESWYACPYRSGIPGTLRLVVGGRSRGSKLTYACMRRHSSSIVSPKFNSLAVVLQRRDWENPGVTQLNRLAAH

SEQ ID NO: 170776 - protein, 100 aa, Heterodera glycines
VFAIAFHNFPNVAQEGAKEFVFWHWAQLQFKNPHVQFVKLADVCVTPFVQAFLCDGREVVFDLECRTREQISEALIGTLGMTETVRKRMKMDSYKREKRV

SEQ ID NO: 170777 - protein, 120 aa, Heterodera glycines
MAAESQYPIPYRSKLTEPFEPGQTLIVKGKTAEDSVRFTINLHHTSADFSGNDVPLHISVRFDEGKIVFNTFSKGEWGKEERKSNPYKKGDDIDLRIRAHDSKFTVYADQKELKEFEHRV

SEQ ID NO: 170778 - protein, 113 aa, Heterodera glycines
KKYKNLFLFLKFNILNAAKNKRLKALCARSFLSSILCFFFLAMASNHHLRRCCHFLLRVSLFLLPYLLFCCFLFLLPFLHFRFSFFHLLFLHFRFFVVSFKIFTISRWICIDD

SEQ ID NO: 170779 - protein, 83 aa, Heterodera glycines; identical to SEQ ID NO: 164160

SEQ ID NO: 170780 - protein, 44 aa, Heterodera glycines
MRWYLWYNEKNAFKRITNAGKIRSNQIRTVNNINLTPILGIISC

SEQ ID NO: 170781 - protein, 67 aa, Heterodera glycines
MVPNKHAENLKPVKPFQALFSFVRPIVRKQLQNLRIANSRCGFFCTHSDDRPHKRSVSLFLVTTSSR

SEQ ID NO: 170782 - protein, 33 aa, Heterodera glycines
FFFFFFFSFVLFIFSRKSCQKFSKQLNFSHRVK

SEQ ID NO: 170783 - protein, 57 aa, Heterodera glycines
  unsure (1)..(57): unsure at all Xaa locations
HPCPRGRSLRFLHPQPFFYSFCWTFRSIFFTILRIFNSSIASLINFVXGKXXKNFFF

SEQ ID NO: 170784 - protein, 135 aa, Heterodera glycines
  unsure (1)..(135): unsure at all Xaa locations
VDDSPLQGIPRSRTIIAMSDPNHGKSSPVYQPLSGKDKHADFASVARVKPRTSKGXHRPVIAQFRAAEHRKSLXEVVPTEAMSQLFSXARVSLVIGINQTNRSTNXERPCTTIHRIMKKLSICQSLRCPGRVSSW

SEQ ID NO: 170785 - protein, 100 aa, Heterodera glycines; identical to SEQ ID NO: 164253

SEQ ID NO: 170786 - protein, 50 aa, Heterodera glycines
  unsure (1)..(50): unsure at all Xaa locations
FFFFFFFFFFFXFIDFIQKYFCIIFSKKQMVVGGGEGDEKKRFSAVCAVV

SEQ ID NO: 170787 - protein, 50 aa, Heterodera glycines
SLVIRILLFLSLSTLSSSLSLPIISLYSLSPSHLPLLSLPLSSPSTFSLS

SEQ ID NO: 170788 - protein, 53 aa, Heterodera glycines
KPKRVNSVWPTPSWGQLRLANSVLGPTPSEPTPSRQLRLANSVLVPKGPTPSQ

SEQ ID NO: 170789 - protein, 133 aa, Heterodera glycines
QKYLPFLLKEISREEGRRQFLFLHALKEVINSECGECGTVGDADEIFKKGVEQIWELLMKYCDSAEESIRNVVAECIGRLIMVNPQKYVEELLRHSADSQANVRATVVTALRFIIVEQPRPVDDFLRPVIGKF

SEQ ID NO: 170790 - protein, 134 aa, Heterodera glycines
VVAQIILMLWKRRHFRSYQFATLVGLWLIPFMVSLKNGWWRFILSWTVFTSSIFYVWRRVNQPAISGSTPRLVYKYFLFMHKLSYIFGIVGYFSLVFTVIGINSVFGISSNLSLDFGVHLLFYGLYYGVLGRDL

SEQ ID NO: 170791 - protein, 91 aa, Heterodera glycines; identical to SEQ ID NO: 164198

SEQ ID NO: 170792 - protein, 79 aa, Heterodera glycines
GNLCHFQLLFRTNSNFLFLKVRTSSTAFVLSILCGTSIELCTPKKFFQYIGTYSKVTHVPFTINVVMLNDSHQMQRSAG

SEQ ID NO: 170793 - protein, 83 aa, Heterodera glycines
GRSEEDKCRGIRAFLLRCATVNQMAAVVHSDQCKANDTNHNDQSHIKIIPPIVGIVFPNFLRWQHLKWKYFVERIRNSRQITL

SEQ ID NO: 170794 - protein, 64 aa, Heterodera glycines
SHTHYFSCTLLYLFLGANSKHIQEQITRILFERLVALRPHPWGLLITFIELIRNQRYGFWKHEF

SEQ ID NO: 170795 - protein, 132 aa, Heterodera glycines
LEVLSLDKCDLKELEEDIFENLTSLRALSLSGNPLDRIPAALSPLHSLTHLAMSSTNLKELKEGDFQKTVPGLEKLYMRKMKYLWKIGENTFNGLVNLKFIDFSTSAKLRLLEPNVFGKDPPQNLSELHLQQ

SEQ ID NO: 170796 - protein, 143 aa, Heterodera glycines
MRTFLFIAVVGLVLAVIMESVNATGNNSPTKGQTPPGSPKGGHGSNKSPTTPHSAGSPHGTQHGSQQNHATGQTPPGSPKGGHGNNKSPTTPHSAGSPHGTQHGNQQKGGHGNNKSPTTPHSAGSPHGTQHGNQQKNATGQTP

SEQ ID NO: 170797 - protein, 112 aa, Heterodera glycines
FETLYFSFEILHSNLKLVFHCVYLPFDKCEAVPYFISKLFYHFFHCLFPFDDTWQQKVVQQPTGREHIRDGIFGRDERHNFEQQFERKAFGGHCWEKQTVLLFGVISEQLAD

SEQ ID NO: 170798 - protein, 104 aa, Heterodera glycines
GFNIETLEFMGWKLNCWDVGGQKSLRTYWRNYFERTDAVIWVVDACDVCRLDDCFNELHSLINEECLHGVTLLVLANKRDLPGSINAHEIEKVGGKCEFGVGEI

SEQ ID NO: 170799 - protein, 45 aa, Heterodera glycines; identical to SEQ ID NO: 167940

SEQ ID NO: 170800 - protein, 118 aa, Heterodera glycines
  unsure (1)..(118): unsure at all Xaa locations
MRTFLFIAVVGLMLAVILENVNATGKNSPSKGKPSSDSTNHKKDHKNEHPKYDSPILAGSSXVRKKENRRMPIRKKAASHHVPVTPGKVXEQSLKMVKKLCGTMMPTMNKPKAVVVDV

SEQ ID NO: 170801 - protein, 179 aa, Heterodera glycines
MITPSSNTSHYRESWYACHVPVRNSRVDIIIIMAANTTHYRGPVVVTTSLFVNSISAVSERNMEYVVQFRFQQEWLDDRLAYSRLGDERSFAHLFVARDQTIWIPDSFFQNERSGHYHMLDQENRFVKIRADGRVTYNRRLTLTLACNMNLLRYPMDVQSCLIDFASYAYTTNDIIYKW

SEQ ID NO: 170802 - protein, 120 aa, Heterodera glycines
MECSDFSDGLKVETMSSENTSSAIESSVCCCCWCSATGSTATTIPFPDDMVETEEFGKDFAECEAIESSSGILSTSANVLCVKAELRTKLFAEITSTSSSSSSPLCRLPCTDCAFGVHSP

SEQ ID NO: 170803 - protein, 80 aa, Heterodera glycines; identical to SEQ ID NO: 167934

SEQ ID NO: 170804 - protein, 67 aa, Heterodera glycines
QETEKQLKVARDFINNEMGQEARMQWVSDVPLNLTKEEMQMAKERFNQLEKDKTKPVLDVVRSGGGF

SEQ ID NO: 170805 - protein, 85 aa, Heterodera glycines
FPLFLRSHFFPLITFLLRFSYLITFSSAFPLITFLLRFSFDHFSSSSVPPITFLLRFSSLITFSSAFPLITFLLRFSFDHFSSSS

SEQ ID NO: 170806 - protein, 30 aa, Heterodera glycines
FFFFFFFFFFFFFFFFVYFFSFINESTEFY

SEQ ID NO: 170807 - protein, 131 aa, Heterodera glycines
RFDLSMILVTATLASDSTPGTHVLDNSDVGFLSNGNANCTLFERWASYVGNMNSVSIMDCVAAARQGDMGQDIPNTALGLFKWCTACFGKSVGPGHSAGTATAGRKLADAAYADEAAINEHRVGKHLLKRV

SEQ ID NO: 170808 - protein, 111 aa, Heterodera glycines
TIPKQHTLGPAPKWRKGNVSNGYSPLPAAAISFLRMGRCRRKFKRNVDHQPNEGIQIPFTFACSNKSFNKWRTLGFGFNVLNLSPPFDVHLFFVFSRNSSPTAISLFILYV

SEQ ID NO: 170809 - protein, 169 aa, Heterodera glycines
IMSDSAANMKRAFVERDENENRILPIPNGPCAAHLLNLAVQEAFKRDESISSLLAKTRHIVGRFKHSNTAFSELKKIQKLLDAPSHTLLQMVYVRWNSALTMCERLTEQRTAITQYAVENNEFELVGVLKCAEEATKRFTEEPISFVLPQARSLHDELHEMKIVHRTVE

SEQ ID NO: 170810 - protein, 177 aa, Heterodera glycines
APDGQRICTSTTAPRLRTDNGFKLWTYRGDFVYEQKYDREELWEIKWRPCAAYNKFKIEEPNREQSTSNSSRINDGNAKTPFDNLPKGSLTQTARYVPPHLRGKPQKKEEKGKNETNSEETDVGKKIRTLQKKLDDISKLKTKRAAGHQLELNQMDKIRNEDRLLEEMERLTATANC

SEQ ID NO: 170811 - protein, 49 aa, Heterodera glycines
  unsure (1)..(49): unsure at all Xaa locations
DLLCIRDRICDLYLYVLSCIHLAVVISFTCIFQTNMNNFXKKKKKKKKK

SEQ ID NO: 170812 - protein, 128 aa, Heterodera glycines
QKKRISKTGEGEEEEGEELIQQEDDLQSVESQNENCRADFCLDRHDHQQNGNAADDDDDDDECCDQEKLKLIEQQETMTTAEAPLEAKGRPRPAMLQIHTVQPYQSAEKVKSPAPNAAADEAFLGQMR

SEQ ID NO: 170813 - protein, 72 aa, Heterodera glycines
  unsure (1)..(72): unsure at all Xaa locations
SRHGKWSGQVEQKERGKVRQSLVVDVLALHAHLFYFLKLSNKSGSFSHNHFPLLIFYFPCFFICNKFVYFFX

SEQ ID NO: 170814 - protein, 110 aa, Heterodera glycines
MKQQSVDSFIPSSNSLQICGGCEMRIEERHSLCVHRPRHFANFDRETEAEYWHENCLKCCQCERRLGTGEKCFVRDGRVYCREDHSKSFGTSSCQPNCARCAIPIEPAEL

SEQ ID NO: 170815 - protein, 69 aa, Heterodera glycines
FLRNSKGLSEELVHWCHGASGVLHLLIVASLEFKEDKYLESAERCVNLIWARGILRKGPGICHGVAGEL

SEQ ID NO: 170816 - protein, 111 aa, Heterodera glycines
MRKSGVESSADTLSPASSSAELSSRLLNANPVWSVYSSSNPYSYWPYRYLTDPNSHEVFWHDVHSQFSALRRLDLFGKHKPPVDYMANNHFWTYPYPYWARHRGYLFDYAN

SEQ ID NO: 170817 - protein, 54 aa, Heterodera glycines
FFFFFFFFFFFFFFFFFFFFLIHNFMSQKSKTTTLHFAYFRTKSSRIYFTSGSK

SEQ ID NO: 170818 - protein, 171 aa, Heterodera glycines
  unsure (1)..(171): unsure at all Xaa locations
WPITVHLKNFPDELIRCRTKETLKFCFLQSLKEACQLKLGSNIAASMTKDEHGRLFDGLCNDRFNDFWMVNDKLMGLRSSSGEEQFSTIPARFYESSYSFRQLLLHSKKQLDDGNMGEVLLIDALHKVFPDYAIETDFEAVTHGILLPLNTPLIWLARNLVYPDNXAHIVI

SEQ ID NO: 170819 - protein, 130 aa, Heterodera glycines
CIATYETDGQAQLARERLHNVVWPVASDLALCVEFSTEEKLNRRKAEEEQEASANNSALGGGLGLTIVVDNRGRGPETVPNSGPTVLIQHDKKRQKDAENRKRKVEELEKSQKTLDEVFKKTKTLPAIYF

SEQ ID NO: 170820 - protein, 89 aa, Heterodera glycines
LGQLIANFYIHFRNTLYDSEIFQLQFRFDDQYPFSSPEVMFMGENIPVHPHVYSNGHICLSILSDDWTLALSVSSVCLSIQSMLSSCKE

SEQ ID NO: 170821 - protein, 132 aa, Heterodera glycines
SAGNGVQKRTVSPSNSVGSSNGSGSVSSKFQSQDLISELSDRLSKRKMTVEASSNANGTPNQPNSQTLPVNNAKGSANPYGRIPSVSSLSSQDDATAGGGTPATAGAASAAQDSQLTCETVVKGPTQLTCEP

SEQ ID NO: 170822 - protein, 109 aa, Heterodera glycines
SKFHLENSINSILKWLHHRLNWFRFQCFCSSFALAWPLSRPKLIMAGVATAMSILTDFMANGKPVLVHPKMLALLVAVEKEIPTEEEEEEEDHHHQTIFERKKELQNQN

SEQ ID NO: 170823 - protein, 29 aa, Heterodera glycines
FFFFFFFFFFFFFFFFFFFFFFHSSNLFT

SEQ ID NO: 170824 - protein, 123 aa, Heterodera glycines; identical to SEQ ID NO: 164205

SEQ ID NO: 170825 - protein, 94 aa, Heterodera glycines
RLGQFLGIVIVAVKPQIFPGFLDELRKNGWLNFVGPEVLCVSIMAGIALDTFKQQLKLVGFNGHAARFMPNVNCLVSAGIVLVCADDCVPTEMV

SEQ ID NO: 170826 - protein, 149 aa, Heterodera glycines
TNFEPNRTYTLTGIYEQSTKIDPPQSETNFVIMHKSEQTRQIMKWALLCAAEPDCMVPIGQTKACIYTATAPNLTCHRQDQSLMEILRYNMEYRQEIENPSFLTQLNPAHPRSSNRPLQSSGISGFFDLLRGKHFGGSQSEWLQRVQCC

SEQ ID NO: 170827 - protein, 30 aa, Heterodera glycines
FKPWAKKNFFPIKLKIFIPKNFFKKPLKRF

SEQ ID NO: 170828 - protein, 44 aa, Heterodera glycines; identical to SEQ ID NO: 167900

SEQ ID NO: 170829 - protein, 49 aa, Heterodera glycines; identical to SEQ ID NO: 164203

SEQ ID NO: 170830 - protein, 44 aa, Heterodera glycines; identical to SEQ ID NO: 164159

SEQ ID NO: 170831 - protein, 39 aa, Heterodera glycines
FFFFFFFFFFFFFFFFFFLKFYCLFASLGFFQKCLLIIF

SEQ ID NO: 170832 - protein, 133 aa, Heterodera glycines
NQGMNQLALPRKAKKTNKTNAIVPVQNAASFGDRGYIPSSEIILKTKQKRRPEASAEEYIKFVKNAVNSLNKSDNVHFLTNGFSLVGKNAQQELQRYHIYPRNRLMIGGLMELIANRKMKSADELEYMVLEKV

SEQ ID NO: 170833 - protein, 38 aa, Heterodera glycines
LFFFFFFFFFFFFFFFFFFFFFFFFFFFFFFFFLDVEI

SEQ ID NO: 170834 - protein, 114 aa, Heterodera glycines
MSSRRNEYLDAKIYVGGLPEDATSEELDDAFHRFGRIRKIWVARRPPGFAFVEFEDARDAEDAVRALDGTRICGVKARVELSHGSGRGGGRGFRGGGGRYDDRYGRDRYDRDRD

SEQ ID NO: 170835 - protein, 49 aa, Heterodera glycines
FFFFFFFFFFFFFFFFFFFFIFGICGLQNRTIKKSIRCPITFCNSSVCQ

SEQ ID NO: 170836 - protein, 39 aa, Heterodera glycines
EKEERKEVEKAAWINESKAKQYLLNILFFGKIFPIFHFQ

SEQ ID NO: 170837 - protein, 43 aa, Heterodera glycines
IMQSKQKPTLSPPPGDYDAFIAFSRLFFAAFKMLNFKNKNKFF

SEQ ID NO: 170838 - protein, 131 aa, Heterodera glycines
EFRVAIEKGDAAKFDGLLRESPRFLVNTSNDLPTILHIGMRCNAMHIACRSSNVHAVRQMLALVQSGEWLRDAYGTDACVKERSDNLLDALLNTPDKIENNTPLHYACRQLCEPIFRELIGHEQCHRSPVN

SEQ ID NO: 170839 - protein, 52 aa, Heterodera glycines
RFVLRFLFKWKSFGTFVVDERKMANSEEKVEQMLCLFSKRFAPPKTFFPSFS

SEQ ID NO: 170840 - protein, 52 aa, Heterodera glycines
  unsure (1)..(52): unsure at all Xaa locations
KRIYQNIIKFLFISHIIPHRFACYVCRSILSFSPNSLKWKIYKKLNKGLIXX

SEQ ID NO: 170841 - protein, 150 aa, Heterodera glycines
VSVSDGRSMGTFASPSSKKSPGPSAISCWLNCSLSLICSIILASRLRLCSSTICSMEGANSVWYCWLGCCNSLSRRSAGESKVGGSFGMGGELSEERTGKEPPSEKGTNQTIKAFLTGIEMVGGASDTKEKCGDHRQWAKNNRREFPRNC

SEQ ID NO: 170842 - protein, 57 aa, Heterodera glycines
RRLFHRKDWIINPLCAESELTDRHAMLRFYHPTHSFSVIFASAVSFPFCCLFCDGFN

SEQ ID NO: 170843 - protein, 88 aa, Heterodera glycines
AIPTDKGGNLFLDRDPKMFRHIIGYLRLKKERCAASLALPAKPDDLAKLIGECEALNLVELRELALEMLQKYVRTEEQHYVTSYVQMA

SEQ ID NO: 170844 - protein, 196 aa, Heterodera glycines
LTKENYVEMESKVKAVFEQLKGDADHFLFKEGDRFLQEANACRYWPTGRGIFHNAKKTFLVWVNEEDHLRIISMQNGGNVGQVLERLIKGVKAIESKVPFSRDDRLGWLTFCPTNLGTTVRASVHIRLPKISAKPDFKSICDGLKLQIRGIHGEHSESAGGVYDISNKARLGLTEFEAVKQMYDGVKHLIELEKKA

SEQ ID NO: 170845 - protein, 30 aa, Heterodera glycines
LFFFFFFFFFFFFFFFFFFLITTLVFKTNI

SEQ ID NO: 170846 - protein, 71 aa, Heterodera glycines
TMITPSSNTTHYRESWYAFTYRSGIPGSTSSSSWPLILLTIGGGGDGIAQHWHALISLNRPVAIIHTPGFR

SEQ ID NO: 170847 - protein, 169 aa, Heterodera glycines
AEGDVFRGLQVVEFACNAASLLLGEHLPNIAKDMETYSLRLPLGVTAGICPFNFPAMIPLWMFPLALVSGNTMLMKPSEQDPGATMMLMELAKEAGIPDGCVNVIHGTRSAVTFICEQPDIKAISFVGSDQAGKYIYEHGSKFDKQKSLRKWHCPFHSVGNCRAPFRLG

SEQ ID NO: 170848 - protein, 119 aa, Heterodera glycines
ANIIYTMHFYAGQHKDDIRNKVKTAYKLGLPMFVTEYGCYSADGNEKANLEELKKWMELLDGYGISYAAWHVADIGEQSSILTKSSEVNNICDPAHLTNYGEAIINKLKSQNNGVKCSG

SEQ ID NO: 170849 - protein, 118 aa, Heterodera glycines
MANYCSFKRFSKSIEFIFAIRSHENLQNFPDELIRCRTKETLKFCFLQSLKEACQLKLGSNIAASMTKDEHGRLFDGLCNDRFNDFWMVNDKLMGLRSSSGEEQFSTIPARFYEVLIY

SEQ ID NO: 170850 - protein, 83 aa, Heterodera glycines; identical to SEQ ID NO: 164182

SEQ ID NO: 170851 - protein, 49 aa, Heterodera glycines
CLLIINVLICKKKKKKKKKKKKLKRSYHCLKKQKEAASRGTKITQLLCC

SEQ ID NO: 170852 - protein, 52 aa, Heterodera glycines
CSFFPLKEPFLPPLKPLTNQFYSPKFVTQFCTLESVAHPSLLIFILYFCPSP

SEQ ID NO: 170853 - protein, 37 aa, Heterodera glycines
  unsure (1)..(37): unsure at all Xaa locations
FFFFFFFFFFFFFFFFFFFFFFFFFFFFFFFXICSLI

SEQ ID NO: 170854 - protein, 43 aa, Heterodera glycines
YNTIIGAHTNHVECFWKNLKMKFKAISGTSRELLLSYCDEYMW

SEQ ID NO: 170855 - protein, 73 aa, Heterodera glycines
TDREEEGREIRFWWRTNAEEWEKDTGKVKAIANKKNDELMTTPSLSNIKWKEKQRATIHPILLFITAIKANNY

SEQ ID NO: 170856 - protein, 117 aa, Heterodera glycines
MKALIGTVDELNKAVNAYGKYTVEKQKYDTMYNNLMQKRQTENEARQSRGEPPLTMEDIKRQLKQPQMQTKYGMLDLLLNALDTDAFTTYQIQTTNENVAKLHLSQAVSAQPNLERK

SEQ ID NO: 170857 - protein, 107 aa, Heterodera glycines; identical to SEQ ID NO: 164180

SEQ ID NO: 170858 - protein, 91 aa, Heterodera glycines; identical to SEQ ID NO: 167864

SEQ ID NO: 170859 - protein, 55 aa, Heterodera glycines; identical to SEQ ID NO: 167863

SEQ ID NO: 170860 - protein, 50 aa, Heterodera glycines
FFFFFIHSVALFVLSIPFFIFFLSLLPSSPCFHIFVLSFFFVCFNFYFQF

SEQ ID NO: 170861 - protein, 131 aa, Heterodera glycines
RVLDSSEADCIFLVGGDGTLSRALVGLSQNSAPLPIGLFPGGRKNIAFWRIFQSKNQSRDSKSVRMFCESAMALIEGENRLVYPVKCSITEEMNDSPSDHQTVNTPNTFWLLSDLCAGWFEHCEQKAPKLW

SEQ ID NO: 170862 - protein, 50 aa, Heterodera glycines
VAIMAEGKQHAMGIGQMKLSSANVRSQNVGIAIDNVHFMNDGLWRLTTVQ

SEQ ID NO: 170863 - protein, 50 aa, Heterodera glycines
FFFFFFFFFFFFFFFFFFFFFFFLSIYMCFIKSFLQQLKKSSLQKFAISP

SEQ ID NO: 170864 - protein, 28 aa, Heterodera glycines
  unsure (1)..(28): unsure at all Xaa locations
FFFFFFFFFFFFFFFFFFFFFFFFFFXV

SEQ ID NO: 170865 - protein, 80 aa, Heterodera glycines; identical to SEQ ID NO: 164170

SEQ ID NO: 170866 - protein, 70 aa, Heterodera glycines; identical to SEQ ID NO: 167847

SEQ ID NO: 170867 - protein, 51 aa, Heterodera glycines
SAETAFSAEGTDRTKSLNCEIGHSFVILIFHFFYLWPFSENTQNLIDLIKK

SEQ ID NO: 170868 - protein, 122 aa, Heterodera glycines
MAKFVAIALLSLTIVSMALAKTGKSQTADEVEGFRNMNIGDNNKVDAGKEPAADKATKKGKAQKAGTKPAAATNEPAAAKGTKNGKAPKTKAKQEVATNEPAAANEWNDQLMGMSVEKFNEE

SEQ ID NO: 170869 - protein, 179 aa, Heterodera glycines
LITPSSNTHHYRESWYAFRYRSGIPGSTSSSSSWPLIPLTIGDNKNFLNSGFCGVDDLECLNLLSAFVRYVRCGGICIIDPTDLLPIERYIRLPSGVFRPVKVPTNAITPLLTSEVNDNSAAVATLTDGRLALFTTDHFDSIADDSATFLPFSTTLSGGMMLDCAVKSDGRLLCSDNLG

SEQ ID NO: 170870 - protein, 178 aa, Heterodera glycines
LRQALILLTIGKAGTPAVPVRNSRVDIIIIIIIMAANTTHYRALDQQCTISRSGISMIASGIATELLASVLQHELGAEAPALLAEVDENASQLGATPHQIRGFMSRFHLMMPTVRRYDRCTACGHTVKQFYRTEGFEFLNRIFQCPAELEQITGLAELQRQADAFQSEVIEMDDSESI

SEQ ID NO: 170871 - protein, 112 aa, Heterodera glycines
  unsure (1)..(112): unsure at all Xaa locations
TLHFYASSHFVDGLGNKLKTAVNKGNHMILYRPKPLLFATVLXGLPVFVTEYGTCEASGNGNLNSGSMSSWWSLLDQLKISYVNWSITDKSEACAALTGGTSAANVSDFGGH

SEQ ID NO: 170872 - protein, 61 aa, Heterodera glycines
FKFQWTTVFFVISNVKSKMPSRDLWEYGNLGILWKLGMGQICFVQLLSKLGQIFIQIKSFS

SEQ ID NO: 170873 - protein, 131 aa, Heterodera glycines
  unsure (1)..(131): unsure at all Xaa locations
GDNGMYLNIILGSNLNITLPSPDERYRYKKEYESFKLSVAFVILAVFFVVIWLPPILRPLDALCNFLLVWYYCTLTIRESILRLNGSRIKGWXLHHYITCVLCCITLTWSGGDCYEHMRPTFVVLVCYVSS

SEQ ID NO: 170874 - protein, 131 aa, Heterodera glycines
GDNGMYLNIILGSNLNITLPSPDERYRYKKEYESFKLSVAFVILAVFFVVIWLPPTLRPLDALCNFLLVWYYCTLTIRESILRLNGSRIKGWWVLHHYITCVLCCITLTWSGGDCYEHMRPTFVVLVCYVS

SEQ ID NO: 170875 - protein, 117 aa, Heterodera glycines; identical to SEQ ID NO: 164216

SEQ ID NO: 170876 - protein, 206 aa, Heterodera glycines
MLLNISCLPINYGTNPRSTHYKRVTRNRLAEKGPDNGDECDTSFWTMMAYRHHFNDQNGTDCEEDASMLVGAITVSNRNSNCSCCSSNKTDGVVQPQKQMFSVQIQTLAVLPTFRRHGVATRLLNSLINQCEKWANVENIFLHCQTTNEAALCLYRAHGFEVVQQIHGHYQCRAIDGESADAFLLERRFTNENDEERKVRQNAAFH

SEQ ID NO: 170877 - protein, 60 aa, Heterodera glycines; identical to SEQ ID NO: 167834

SEQ ID NO: 170878 - protein, 43 aa, Heterodera glycines
TQRDQLEFRAQHASFGDQTYNDDEKIRKLMTALSLQFVGNAIK

SEQ ID NO: 170879 - protein, 136 aa, Heterodera glycines
GEMELRHSNYELATALLRRATTPPPVRRDSYFDDSAKVQNRVFRSLKLWSLYADIEESMGSLESCKAIYERMLELRIATPQIVINYALFLEDNQYFEDAFKAFEKGIGLFRWPLVFDIWNVYLTKFIQRYGGKKLE

SEQ ID NO: 170880 - protein, 147 aa, Heterodera glycines
  unsure (1)..(147): unsure at all Xaa locations
SERQAKINATGDRLKEASKINLSLSTLGNVISALADXESPHIPYRNSKLNRILQELLGGTAGPTVGAEQPLGKDDKINVSLNAFVGSWQWRRASEHSKQNSATLRSSTAHCRRSPRGWANDGAMDPTATTNNNQRCRKMNRNIKYQK

SEQ ID NO: 170881 - protein, 78 aa, Heterodera glycines
FFLMTNKEKQKILKWKTKIKSKERFEPCEHFHHQIPLTKTRIFWQQVEKHFQLQNLFHEAQLVPFDLLKLVPRVDFVH

SEQ ID NO: 170882 - protein, 29 aa, Heterodera glycines
FFFFFFFFFFFFFFFFFLIHYVFMQSKNR

SEQ ID NO: 170883 - protein, 51 aa, Heterodera glycines
YRHRKMCKIQGLYCFAKILMDKFNNWIFNEFQYMHRRYPILQYFICFRLTG

SEQ ID NO: 170884 - protein, 58 aa, Heterodera glycines; identical to SEQ ID NO: 164154

SEQ ID NO: 170885 - protein, 77 aa, Heterodera glycines
WKSLRIDGTNLRKRRKNLAYNSKAQMLRYRFQCPFASLEVFVDVKVKSVADQRNSEAKLRRWEQIEHRKPTIGGDET

SEQ ID NO: 170886 - protein, 131 aa, Heterodera glycines
HTQPNELPQLSPQDITMHSKIIHQNQWDGERSVIITCSFTPGSVSLTSYRLTPSGYEWGRNNTDKGNNPKGYLPSHYEKVQMLLSDRFLGYFMVPSAGVWNYNFMGVRHDANMQYDVCLSAPKEFYHEDHR

SEQ ID NO: 170887 - protein, 54 aa, Heterodera glycines
LAHCFCGHNFLEGFSVFSRTKLSNNRSVMPLDVRGCTRATLAKSACLSFPERGW

SEQ ID NO: 170888 - protein, 118 aa, Heterodera glycines; identical to SEQ ID NO: 167815

SEQ ID NO: 170889 - protein, 121 aa, Heterodera glycines
MRSLLFLAFVALFVVKCSADESMQNDENDEQFPPGPPPSNEMSEESNDRRKRSPFFNFFGGFKKGGRGGRQKGEKPNGVPPTGSPPAEREKRSLSRGNAKMGGRGPMGGRGGQKGGRGGQK

SEQ ID NO: 170890 - protein, 143 aa, Heterodera glycines
NPSLNLKKESVLKKTFSVEAGDSLTNAILGILPQQSADDAEADSTGNGPMHSAEHHQHETDQQQQMISSGTGAASVEGNAIAAGVRRHSLLGPIPIRSQQQQSVEGQQSTIGQPMVRNLPPATVRTANFAQNHPQSLVNSQHP

SEQ ID NO: 170891 - protein, 130 aa, Heterodera glycines
MSQQNEEAPGKDQKELRAVQHDMERLFKARDAKGLSELYTVDAIFASNAHPPIKSRAEIEKLWIKFLDTDSAELHVTFDEVYFCGDLGVENGTYKFTNNDGTVTQNGLFIQTFKRGSDGKWLIHNDFYTC

SEQ ID NO: 170892 - protein, 69 aa, Heterodera glycines
  unsure (1)..(69): unsure at all Xaa locations
KLMKINYQIEMNLTNAGSLKKNTTEVLMPFFARTKHKMQKHKSSSKTRSKKFTICVKLIFLSYNKTKAX

SEQ ID NO: 170893 - protein, 55 aa, Heterodera glycines
STSTFHLPSISLTFRSTNSASYSSVSVSAGAVPPSSASELIVVVPPPPPSVVVPV

SEQ ID NO: 170894 - protein, 105 aa, Heterodera glycines
HHFKIFPKMRVLPLLFSALLLLSVGLCFAQFDQSPSAALNHVRAKRGYKPWKKQSFSSSSSEMYRRRRPSGNGHYRDYNGYGSNGYYRRKPGILERALGKITRSY

SEQ ID NO: 170895 - protein, 184 aa, Heterodera glycines
QFRPQNDGFFSEDEQQKWVKEHIGEAEIIYTMGPIKVDASLLVVAKALKAVVTISAGHENIDTVECARRGIRMGFGGAILTEATAETAMALLLTVSRRLVEAVQIAKEGKWPNNWSPKFCVGKALEGSTVGIFGMGRIGRSIADKLSAFRPLEIIYHNRKANSEYEGRFRYVPFEELIERSDFL

SEQ ID NO: 170896 - protein, 79 aa, Heterodera glycines; identical to SEQ ID NO: 167858

SEQ ID NO: 170897 - protein, 45 aa, Heterodera glycines
NIKIIIIIIKSFMPTFFSVQWSSIYMMFAAVVLAQQGDENKCENV

SEQ ID NO: 170898 - protein, 30 aa, Heterodera glycines
LKKEWNVDQTISIVLFNDFCLHFNFLFPNY

SEQ ID NO: 170899 - protein, 86 aa, Heterodera glycines
LYPIKKSKSSLKMKLSIILLLSLAFCASIIDAYPSGNGKDLEADNEKTEVKEEKMEKREAEVEEGKKEKKAKGAAGEEAKEVKTRT

SEQ ID NO: 170900 - protein, 76 aa, Heterodera glycines
GGGSGNAGDAVHQNGTTVLDDGMDLICHDVKVREKVLIRRVLHPQLHRINFKTNYYIFIPLIQKWFKQLNFLTNYY

SEQ ID NO: 170901 - protein, 60 aa, Heterodera glycines; identical to SEQ ID NO: 167801

SEQ ID NO: 170902 - protein, 38 aa, Heterodera glycines
IFMELGQIAFDIFSIIDILLTLTVLLIDSQIFRKYANC

SEQ ID NO: 170903 - protein, 32 aa, Heterodera glycines
SIFIQLNFCFGVESTNNKNSKITHLKSKFLTV

SEQ ID NO: 170904 - protein, 151 aa, Heterodera glycines
SQKALEDLDKVQTELDTLNETASDEILKVEQKYNQMRKPFFEKRTHFIKQIPNFWVTVFINHPQISNILEEEEEECLHYLTKVEIEENEDIKAGYKLKFSFDPNPFFENSEIVKEFNWTAAEPNSVTTEIKWKHSTMKKMRRRTMVGMRRR

SEQ ID NO: 170905 - protein, 147 aa, Heterodera glycines
RSVVSKAANNVAEQGTSSVSGNKENLLNAYLQLSKCRLTALIACTSVSGFLMSPALSSAPSSLFFSCVVGTALLSASASTCNNVIERQHDKQMKRTRSRVLPVGRLTPIHALLFAGATGTAGLGILCLSCNHLTSALGFVNLALYAG

SEQ ID NO: 170906 - protein, 148 aa, Heterodera glycines
DRIKEWIYPMDVGPMIEELDKLAYFCRSQEKDSVMNHLREMPVGHFALRLSGTRRRFLALSIRVERDEKNQKGIAHYLVLRNEHGFRIKGSKRYFQSLPMLITHHSVITDQLPCRLLLSDWRWTRGDANQRRRQSSGGSTLAVLRATE

SEQ ID NO: 170907 - protein, 127 aa, Heterodera glycines
PKEAVEEEHGEEEGHNNIHFMYSITLDHYRTRPLVTVSTHSVQKPSFVSFFPFQCRPLFLIRSFASISLPKHKSRHNPSHPNSFLFLFPLIFSLIPLPPLNALTNPKDFQILFHSNFKFANNKCITI

SEQ ID NO: 170908 - protein, 110 aa, Heterodera glycines
MRTFLFIAVVGLMLAVILENVNATGKNSPTKGKQSLDSPNHEKDHKNEHEKYEAAYIYRGDFFHDSKNEPHVEEQLVAAIYDLISKYKVDLYEIVIFVSKSPCFHQDCEP

SEQ ID NO: 170909 - protein, 100 aa, Heterodera glycines
EWVICAPAAILRRSGHFSGPFSGVEPLSSVTRHHHGSQIHYHRKLIRQTLERHVAGTRPCDQLSCSESTLDARRALGFVANKCAPLWGDWSFGACISSRI

SEQ ID NO: 170910 - protein, 75 aa, Heterodera glycines; identical to SEQ ID NO: 167783

SEQ ID NO: 170911 - protein, 128 aa, Heterodera glycines
MSHLLNNWKVLLHNNVGFRNFVLSRINLEQLVLPVVRVLYDGMCSVPGHGFQRPSPTSSPKMRRQSQFSHNNSTVHTHQTYLALIVLLILSEDDFFKKVIHEMTIKNIDWYTLDRTTHLAETTLGGLI

SEQ ID NO: 170912 - protein, 59 aa, Heterodera glycines; identical to SEQ ID NO: 164110

SEQ ID NO: 170913 - protein, 131 aa, Heterodera glycines
LNEWLQKKGVPSDEAAFFLETYFHENEKQILNNFGRAFIACHETYGTNFTGKLAQIGITEKKLVQICQFLGYDDKIFDIQPIDSDVNFGLPDWKEFCPKLMANKIPKNSVVVMDKLNSVETVGMNKGQNIL

SEQ ID NO: 170914 - protein, 124 aa, Heterodera glycines
MNVKGGGISQVNDSTSDEMRLFRGGLRHAGQTPSRLIYDTTSCIRNYHDKYSYERGFIAHSRSPSNQYLNFHFMYGGFKKFALERHVYQNWYRKNIRNWWLPAIICYTAGCLTMRMYDNAAYDY

SEQ ID NO: 170915 - protein, 26 aa, Heterodera glycines
LSTLARLPGLTGRKVGMTSNHHAPYV

SEQ ID NO: 170916 - protein, 67 aa, Heterodera glycines
LFFYKIYGGKNYSSASSALIVLRSCNTIANFSNALQFSSRNSLAFSVASSMVSRTALSRALFSLFLP

SEQ ID NO: 170917 - protein, 36 aa, Heterodera glycines
SLLQNDFSHNVINHYQIFKVSSIFSASISFFKLFSE

SEQ ID NO: 170918 - protein, 46 aa, Heterodera glycines; identical to SEQ ID NO: 167772

SEQ ID NO: 170919 - protein, 77 aa, Heterodera glycines; identical to SEQ ID NO: 164075

SEQ ID NO: 170920 - protein, 103 aa, Heterodera glycines
MLSYKMSWILDKVKKNRSKPPSTIFIIRDGVSEGMVPNNIHDEFPSYVRACKKYDPTWEPKFVYCIVDKNHNKRFFVKGQQQVENTAPGAVIDSKVVRVDIHE

SEQ ID NO: 170921 - protein, 161 aa, Heterodera glycines
HTEDPLIVGICANSLKNPYKFCGDYYFQPCTQDVLEPNMLSYKMSWILDKVKKNRSKPPSTIFIIRDGVSEGMVPNNIHDEFPSYVKACKKYDPNWEPKFVYCIVDKNHNKRFFVKGQQQVENTAPGAVIDSKVVRVDIHEFWMQSHVPLKGTSKMPQYIF

SEQ ID NO: 170922 - protein, 81 aa, Heterodera glycines; identical to SEQ ID NO: 167764

SEQ ID NO: 170923 - protein, 70 aa, Heterodera glycines; identical to SEQ ID NO: 167763

SEQ ID NO: 170924 - protein, 76 aa, Heterodera glycines
LVLLTIPKHSLCHLFGVLQSLLLCRRGRRRDWYDHLHVSDGEKAGPAVHCALKPMLVNLRIELNDLALLKVEFARV

SEQ ID NO: 170925 - protein, 45 aa, Heterodera glycines; identical to SEQ ID NO: 135550

SEQ ID NO: 170926 - protein, 26 aa, Heterodera glycines
MFKKLRLSRRLIIHTFLRFSFNRFHF

SEQ ID NO: 170927 - protein, 159 aa, Heterodera glycines
PVELSRDSPPNSTETIFVIKGTPFQIHHVQHIIRIKVGDVAPGTPLPSFHGNAGITNATTPLAVGNPYGPTPHQAFSAAPAQQDPSAWTQYYNQQQAMAIAGGPPSQPASFGATPAQHYQTVPGTMQTAVSQAAQLHSTQMQQQQIHQQQQATIAQPQQ

SEQ ID NO: 170928 - protein, 104 aa, Heterodera glycines; identical to SEQ ID NO: 158774

SEQ ID NO: 170929 - protein, 87 aa, Heterodera glycines
FPSNFPPSFCCCFCSLCCTFLHRPMLVPNGITPTQFRWPTIVALFSTICGDGSDLALKKTNKTIVNLCIILCKVLFNFVLINAINSK

SEQ ID NO: 170930 - protein, 90 aa, Heterodera glycines
SPQVKVNLLLHAHLMRIQLSAELTKDTDWIVLKTVRLVQACVDVLSSNGWLSPAIHAMELSQMLTQAMYSNESYMKQLPHCTPELLERCK

SEQ ID NO: 170931 - protein, 33 aa, Heterodera glycines
RRIPQKTHYFTNNINEKMNLFKLCFHFILYTDC

SEQ ID NO: 170932 - protein, 138 aa, Heterodera glycines
NNSSHLFAPTHCQNNEQALSLIDFMLTLNPEKRPSASAALDHNFFFETPIPAINIQELLQQLRGTNLFEYTSGCGAHANRRRPVAPAAPMHQQQIRGKMPSVGGAMHRATGGAPQRAQHQTVGGPPNIHRSTGGAPQR

SEQ ID NO: 170933 - protein, 17 aa, Heterodera glycines
WKSIHSISSCCCCCCHP

SEQ ID NO: 170934 - protein, 78 aa, Heterodera glycines
MPSKRITVPLFLLLTVLVLALRASETKIKAMEEKVMEEQDKKMSKVFTFLSFQQLLTWLFPKCLLLIFYQCKHSSFIK

SEQ ID NO: 170935 - protein, 41 aa, Heterodera glycines
  unsure (1)..(41): unsure at all Xaa locations
RSETHWRVEEEEXVARXFFPTFCLKSSFALRVGNLRACCHP

SEQ ID NO: 170936 - protein, 73 aa, Heterodera glycines
MEKEYKQSVRKLYAGKHRGYLLMPVELPNPNDPNGDRFSGQGHVLMEDLVWQLRGKTRNATHGIIMFYVIRNL

SEQ ID NO: 170937 - protein, 80 aa, Heterodera glycines; identical to SEQ ID NO: 167732

SEQ ID NO: 170938 - protein, 112 aa, Heterodera glycines
ILLNGQPMDKSEYIIYSFENGELGANEINIIIVHYYFINWLAPLTVHLLPNTHPPPKPAPRAPIELPNQSNWRFIRSGAKTPAEQRDTDRSRRRRSKTEGRRSERRKGIVFN

SEQ ID NO: 170939 - protein, 158 aa, Heterodera glycines
  unsure (1)..(158): unsure at all Xaa locations
YLSKSNTYYLKIYAFLNSKMGQKESRHAFVNCALIRREEFEDKIQELNKKCAECFEESTLNMLFATKSTEERGILWQRSVRIHCFTVFDEKIYRKVYSLFQFLKFYESFIQILEASEASKHRENSLNNKDLMSMXIFKESCCEYSEDGRCIICFDSFP

SEQ ID NO: 170940 - protein, 50 aa, Heterodera glycines
FFFFFFFFFFFFFFFFFFFFFFFFFFFFFFFNFRKIYATKNEKYNNNQIY

SEQ ID NO: 170941 - protein, 65 aa, Heterodera glycines
CTEFGQKTCNSPPPPLTFISFSTALFILFYLSPPSLNAIPSFSFFSLFSHFRRFVSFTAHSFIVS

SEQ ID NO: 170942 - protein, 98 aa, Heterodera glycines; identical to SEQ ID NO: 164065

SEQ ID NO: 170943 - protein, 123 aa, Heterodera glycines
QNMLKKAIKSGLPVFVTESGAGSGGSNAPVNLPVMNQWWSLLEQLKISQIVWAVRGEGNLQNPLNKNTAPANIGQNWALTEYGKVVKNVFTKNAKPKRGRKGSGMREKKERKANEAEEKRNER

SEQ ID NO: 170944 - protein, 62 aa, Heterodera glycines
GQFNGRIFNNKLNNLGFPTFITFAQLMDPSRGFYDKDGDKVTLAVDVAVKSKRGTKRKLSDE

SEQ ID NO: 170945 - protein, 49 aa, Heterodera glycines
TFLYEFPAPQMIRQINDQQMDNDNDSRLGNDSYHRSVSPISQIGCNRLR

SEQ ID NO: 170946 - protein, 51 aa, Heterodera glycines
  unsure (1)..(51): unsure at all Xaa locations
XIKKFTVNSAGNTMTNLLVSDHNNPPGKCPPHSATTATRTELSYVVLFRSL

SEQ ID NO: 170947 - protein, 52 aa, Heterodera glycines
IFNFLKRKQNLDKGKRIEEMTERDSLFIQFLRTFTTANWSAENWAGNCRRRK

SEQ ID NO: 170948 - protein, 63 aa, Heterodera glycines
PITGIQAQQIYSAFFLWHKLLTFPHLPCLFQFSYDTTFLNIHFYNFFKLILIHSTVYHKRNFI

SEQ ID NO: 170949 - protein, 95 aa, Heterodera glycines
NFFISFLFNSKINPPVSQRRWYEQKKKDRSVLLEGWNSVLNECFLPLFNQKMNMAESADSKQFRQLRGLLFGRFSESGRCDVIVAQAKAFIRFYS

SEQ ID NO: 170950 - protein, 88 aa, Heterodera glycines
  unsure (1)..(88): unsure at all Xaa locations
XIFQLVLLLIMRTLKNKCGILQGHSLVLVFTLLFSPFGFLLPRVDCELSLFFFRRSPIAQLPSLFLLHSVLPWPIPFVSIFPVVLQSL

SEQ ID NO: 170951 - protein, 59 aa, Heterodera glycines; identical to SEQ ID NO: 164110

SEQ ID NO: 170952 - protein, 172 aa, Heterodera glycines
AAGLNAVQLYIPWNFHEQEIGRFNFGGDRNISRFIRIAKQNELYVLIRMGPYVCAELEFGGLPWWLIKDQAKVRLRSSETTYLRHVHRWLAALLSVLRPLLYKNGGPILMVQLEKEYGSVSVCDHDYMRWLRDFVRETLGEDVVLYTTDGPTEKMLSCGAIESTFATVDFGT

SEQ ID NO: 170953 - protein, 106 aa, Heterodera glycines; identical to SEQ ID NO: 164044

SEQ ID NO: 170954 - protein, 69 aa, Heterodera glycines
FLKIKPIYCSKWRQMFTYFVLISVSPIQHSDHFRPFIHSFVSSVGVRHFALNFFFGQNLGHFALAGDLF

SEQ ID NO: 170955 - protein, 150 aa, Heterodera glycines
  unsure (1)..(150): unsure at all Xaa locations
MRCALYALFDGHAGRRAADYCAEHFARLFVAVFKKYVPPKSAMSVFEKSIRKVFVDTYKGIDDGFLVEARRQKPTLKDGTTATTIFLLDKTLYCANIGDSKAIVCRHKSEKSTNIPLQITVDHNPLVXDERMRIQKSGGTVKDGRVFGIL

SEQ ID NO: 170956 - protein, 98 aa, Heterodera glycines; identical to SEQ ID NO: 143443

SEQ ID NO: 170957 - protein, 103 aa, Heterodera glycines
LLSTPFCCTFVEAKGALVDAIVCQRFSEMRIAPPPSSRHHLLNYSFNVLISFDISICSPKDRTVFASFATSLFKVFVGILARKGADLLLFVVVKRKSISYDGP

SEQ ID NO: 170958 - protein, 48 aa, Heterodera glycines
  unsure (1)..(48): unsure at all Xaa locations
FFFFFFFFFFFFFFFFFFFFFFFXVVKYFFFTNKKYRNLCGKFEVFGM

SEQ ID NO: 170959 - protein, 152 aa, Heterodera glycines
MRTFLFIAVVGLVLAVIMESVNATGNNSPTKGQTPPGSPKGGHGSNKSPTTPHSAGSPHGTQHGNQQNHATGQTPPGSPKGGHGNNKSPTTPHSAGSPHGTQHGNQQKNATGQTPPGSPKGGHGNNKSPTTPHSTKRETELIIEKGKPSPDS

SEQ ID NO: 170960 - protein, 56 aa, Heterodera glycines
TGGKTPGAFFFFFFFFFFFFFFFFFFFFSFFFFFFFFFFFFFFFFFIAFYQQKFQH

SEQ ID NO: 170961 - protein, 67 aa, Heterodera glycines
DNRRDERTVQSRQRAAYDRLMCMFATQQRPDSCGFFEKEWKNEWNCEKSSPKCLMPAQINVNKAFNF

SEQ ID NO: 170962 - protein, 88 aa, Heterodera glycines; identical to SEQ ID NO: 164036

SEQ ID NO: 170963 - protein, 73 aa, Heterodera glycines
EAKTLSYQPSNDELLELYALFKQGTVGDNDTPRPGMFDIKGKAKWDAWTAKKGTTKEDAQQKYIDLVEALLFK

SEQ ID NO: 170964 - protein, 33 aa, Heterodera glycines
ISRTHCQLDEMKFNCMLSLCFQKLTFKLMSIVL

SEQ ID NO: 170965 - protein, 81 aa, Heterodera glycines; identical to SEQ ID NO: 167673

SEQ ID NO: 170966 - protein, 65 aa, Heterodera glycines
HEIVFTAQMPHMRDGVQLEYSPLYQFLIGFLDLEFEFRPETTSFSEDILMEFDVRMAFWRRGGPP

SEQ ID NO: 170967 - protein, 199 aa, Heterodera glycines
  unsure (1)..(199): unsure at all Xaa locations
MPATNSPQSSNLAEKATDSLLNGLQNTPAVTYEDLTVATDGFSPNKIVGRGGYGVVYRGVWKHTPVAIKRIQGKCGSDERQQRERIRQSLQELKTLAKFRHDNVLSLYGYSLDGPEPCLVYQFMSNGTLEDRLLCRVTYNGNHXNGTEPLGWAKKLSICGGVCRGLHFLHTINQMPIIHGDVKSANILLDKHFEPKLGD

SEQ ID NO: 170968 - protein, 255 aa, Heterodera glycines
MDSLLLATNDHSNGETAATLEEIYRKALEYWNSVGSDLNGMLGGFQQLHRPDINDSINFLCELRKKSFLRHFDRALDCGCGIGRVTKHLLLPAFRSVDMVDFSDHLIAQSHIFVPSSSNPTENNSVGQRFVESLHTFAPAEKGGDYDMIWIQWVTGQLEDNHLVDFLRRCKESVLRRDGCIVVKDNVAKGTEKEFDEVDNSWARPREMLHKLFERADCRIVLERKQPNIPKALYEVRTFALKPLSNDETNGMNDD

SEQ ID NO: 170969 - protein, 210 aa, Heterodera glycines
AAISESPLNNCPVKVLPSFTSTFLPDLSNAQVLKPKPTNVDRLPLSNEEFITPTQPKKQQSRPNSPANGVSKLILPRSRVASIRRESDCNSEKGFGEAEAAHEKMVKSAQQVAMGFEDFCLDDKAFEERKRAKSLSEPICIFTNAFLPQCSSPSPSRGSMDGQKQCYSPSAQQVVRSNLAYSPSPSPTPSGTQSMHRMRSCESQTHLPDD

SEQ ID NO: 170970 - protein, 131 aa, Heterodera glycines; identical to SEQ ID NO: 167665

SEQ ID NO: 170971 - protein, 159 aa, Heterodera glycines
LPLQEEPISGGQPNTPPIPAIELSYPVSVIYCGECSMPVEYCEYSGKFERCQQWLERNLPDLAEKQMKIGAGDGKAAEEGNGEETEAKKHQKRGGKGLPKASGGGKGSKEQSAAVPRITLKTEVRSKNKAVTVVKGLTTCGVDLKTASKFFANRFACGC

SEQ ID NO: 170972 - protein, 95 aa, Heterodera glycines; identical to SEQ ID NO: 167658

SEQ ID NO: 170973 - protein, 155 aa, Heterodera glycines
MFSFCYRRAIRKSLANPQTIEVSSFHFSRVLEQNLDAASKRDEKGEEVPLWKDPYKHAMPEQKNTFSEFREANVHWEYVRRLLPRRLIPEIPQNAAEGVTPSGWRAPPEKAPNLPYYIRRKANHLPSIFLERRRDELNPKTMDFEYVELVILTGI

SEQ ID NO: 170974 - protein, 100 aa, Heterodera glycines
LFINANYKFKCPFASAQFSRFVQSLASRSVAKINSESNDRFSLFPLEVLSAKSQVVAGIQYQLRIKVGRSNCSKNVSERANSATHVLEFPSNNKYFYFFY

SEQ ID NO: 170975 - protein, 73 aa, Heterodera glycines
PPCPPGEPGKCYGSGSKESKEKEYKPSKRSIDNFEHGLRVARGYKQEVGPPGPAGPPGPPGPDGPPGECECKY

SEQ ID NO: 170976 - protein, 209 aa, Heterodera glycines
HLRALIPTYVLLFSHFYLLLVLAKGFEGYTFSCLDGCECDTDDEAIHCHNRPDRHFVQLPPSRLRGFTVLALTRNNIDVLPSEEVLLEKLPDLKAVDVEGNEHFDCSTLDHYRILMVMSDCGKTPEQLEADRAKLPTDTQPNEDCDFECVANRRSRELREYVKHLWEMVKEKVSRLAKKHGLDKVVDDVGNFFNDVGERISNIKLKKKK

SEQ ID NO: 170977 - protein, 60 aa, Heterodera glycines; identical to SEQ ID NO: 167644

SEQ ID NO: 170978 - protein, 256 aa, Heterodera glycines
PLRPGDFCTSAISERLANSLLAYEMDADSFLLFYIKQRIERGEDGLQWYNPPYCGEDEEGHVPDNWRTIQQAVLYFEKDNSDEIEHQLIDQLVQHSAVKFSAFKYLVDAYFGLLQRRIERKADNFGCPSVTNLCVPFLAMIAFTGLFARRLAEMDASARVTEEEQQDRRDFRREIYQVSIYGSTMLRYKLYTFANNEDSTAAYSWDRFCADSLQLVEHISSLKERETSIALPSASPLLGVVLCGIAAAAVVYFLIA

SEQ ID NO: 170979 - protein, 87 aa, Heterodera glycines
MNFYKSTTFIGLFFIILANSFFDHADDPKLASSFLCCAIVFHFSGQNFPFRHGSVNGHRTAGSFLCECTWGNLLGNGEKSNGQKKAS

SEQ ID NO: 170980 - protein, 28 aa, Heterodera glycines
FVQFLRFSILSTLSTYRASVCRAPLISQ

SEQ ID NO: 170981 - protein, 110 aa, Heterodera glycines; identical to SEQ ID NO: 167635

SEQ ID NO: 170982 - protein, 275 aa, Heterodera glycines
MPSAHGGPTFLLWHREYLKRMEIALRAIDPSVAIPFWDSAMDQRLPNPADSVIWSSSFMGALSAAGTVADGPVAGWITPSGGPIRRSLGTRGGNLLTEQEVASLIGQPQIENVLAFTSRARSGACTQPTPNPLSVLEFIHNGVHAWVGGDMLPLTTSPQDPVFFLHHSFIDYIWEQWRLLHQNRQQRETQFPPDSQIVPCAGSQNYLLSATMFPFQDPVVLNRAGLSNSYTDSLYTYAPRPTCRAAGDCRSRYLFCDTTSGRPLCTSRIKPGGNC

SEQ ID NO: 170983 - protein, 155 aa, Heterodera glycines
RHLLLKSPLLVLCFVVPSSFSDPCPFFGDYQCPEGFHCAFDKCQDEQGMEPPGDCAKIRCGKESECRQGKCVLYVGRPCGRNVLVAEGLARAVVSDCGPQGKCIGGRCAIDRCADTVCEEMSELCRDGMCMQLSSMFCFSPFDCGPPSLFECHQN

SEQ ID NO: 170984 - protein, 276 aa, Heterodera glycines
MLQAHQYQLQQGHRRVSARSILAHFGFEFSNDYRLGCGHYSKVYKGYFKEAQRTFAIKVTDLESVSEKFKQKFLPRELEVWRELDHPNLVYLYNDFQWSDYQFVVMELAVGGDLLSFLQKCGPVSETTCHNWMLQIVAALDYLHRKGIAHRDLKLKHVLLCENGVIKVTDYGFSKQSSDLSSTFCGSRSYSSPEILLGIAYDMFKSDIWSLGVTAFIMITNTMPFHEDLPNQQIVDSQRKRRYKYPSWLNITKQCRTAIDALLTYQPAFRPNISEC

SEQ ID NO: 170985 - protein, 96 aa, Heterodera glycines; identical to SEQ ID NO: 167628

SEQ ID NO: 170986 - protein, 57 aa, Heterodera glycines
RNSFVFVLSFHLHRRTDWKMITDMQLGIMANVLGVSIFILVIFYHYIVANQKKQSPQ

SEQ ID NO: 170987 - protein, 65 aa, Heterodera glycines; identical to SEQ ID NO: 167624

SEQ ID NO: 170988 - protein, 132 aa, Heterodera glycines
AVSVAEIANGVEEVHGQIFEVAPRYVNLSYIGEGAYGMVVSALDTVTRERVAIKKISPFEHQTFCQRTLREIKILSRFKHENIINIQAIIRAPSIELMKDIYIVQCLMETDLYKLLKTQRLSNDHICYFLYQ

SEQ ID NO: 170989 - protein, 121 aa, Heterodera glycines
QYTFVAMLPSNLFFLLMTMLSSSLLHQTLANKFSAETDAVNPTRLIQRRHLIRSRAIHKEKMHSNDFAEEFPISDGPQVFGIGGTAAFENIGGWDADKKRFGRGKVAELAAQAFPSCENNF

SEQ ID NO: 170990 - protein, 83 aa, Heterodera glycines
MAYANYGYGSYGYGGEDFSAGAYNPRYHYAAAQNAGFDLKTDDGLPRTIYVGNLDVSVTEDFIATLFGQIGPVTKTKVIFDSG

SEQ ID NO: 170991 - protein, 119 aa, Heterodera glycines; identical to SEQ ID NO: 167615

SEQ ID NO: 170992 - protein, 64 aa, Heterodera glycines
LGSDCKFENPEKKKKKKKKKKKNSRGGPVPNSPYSESYYNSLAVVLQRRDWENPGVTQLNRLAA

SEQ ID NO: 170993 - protein, 211 aa, Heterodera glycines
SGSPGCRNSARGSLIREQNRRMASQNGVLENQLEICQGLVNELRAEVDSLRGELSECKLPFRISNSELQNITVRHSRTGDAVERIGPRKANTKSLLKPRARLCSNTPKMAVPSEKRAKRGLTKDSEDDDNFRTAEFVPTTPRPQFLLPPLVLTPLSSRFPPLPRRSFSVEPTPTHIQKNAEQQLTMIRDGNGDMPCPSSQKRLNDNGEIQC

SEQ ID NO: 170994 - protein, 122 aa, Heterodera glycines
RFSAAVRPSVAGGARRSVRLLFALGVFHGGSQQRIALSAFFCRAQINAHSHILHQFALFAGGDQRILRRQPPGAALLSVGGWEVEKVAETAAQHRVNAVFPPVQSASLVHVVQQPPPYSNCP

SEQ ID NO: 170995 - protein, 211 aa, Heterodera glycines; identical to SEQ ID NO: 167613

SEQ ID NO: 170996 - protein, 238 aa, Heterodera glycines
PNLSISTNKTEFPYLVRYPATMALVEFKVKLELVVGIYSADMKLELRSHEGKFISELIGDDRTLEELGVRDQCIVNVCDTSETRNDNSTNDPNAFYVIPEERYANRKDTARKWKQQLMTTATTTTDVERSEQQVPNKIGPGKRCIVQLRDQPPRKAQIAFVGPTHFGENPGTTQWVGVIYDEATGKNDGSLDGHRYFRSEPSHGGFVQIRAIVNVLDDVEQAANDKEQIQQQMEIEEI

SEQ ID NO: 170997 - protein, 126 aa, Heterodera glycines
ISLPSKLNQKKSEKVVVSSVRMDRLSWYQTGESMEEILCQAGSVGIYDGDLKQTSFEQGTASLTYQRIIWADSTDPVGRETGFEFRPPKLKDCRLVLHHSMVHKIEKQHKTMFGRGGKIIVTVKPV

SEQ ID NO: 170998 - protein, 156 aa, Heterodera glycines
  unsure (1)..(156): unsure at all Xaa locations
IKTPNNLHKLPSFAFLSVPAVIRASRSLVDISILTTEEKGEELTDKTMLHLNTEFTWKRQKFKVMLPLPSKPQEKEAEATCNTVQQDRKYYTECAIVRIMKSRKVMKHGALVEXVIKQSQLRFVPDVQFIKKNIESLIDKYYLQRTDQNDEYEYIS

SEQ ID NO: 170999 - protein, 139 aa, Heterodera glycines
MEMQASPGPDCGFTTPSRTSTNSKFIVDVPLSTKREKLLRGTPTRFRLPPVRRLMKSAPNIHHRFYLARDHIEPFAQIVSFKRSEDRPSLSNRYRPELEETYLQQCFVLQGRLGQGDFGEVVSVRSKDDGKLYAVKSSL

SEQ ID NO: 171000 - protein, 205 aa, Heterodera glycines
MRRYLDTEKAVEEFGLREDLRAALENFLVESDIRSDHSLFTFLHNLLPYIMLLNVILLIPAALFFLRSTVSTRKLVTFLLLSTFCWSCYATYMRKYQEILAERFLRTDAVFRRGGGVCSPQGLLSEAFDVMLSYVRIKQKSECLKAYEDELIAPLWQVDPLQVIAEVLSNFFLGGLPASGTHLNLFFNNFFVDTPFHLALVKMLF

SEQ ID NO: 171001 - protein, 173 aa, Heterodera glycines
WIPGLQEFGTRARSSTETPGPPGPSTVTPGPESSTSTPSEGPGTPSTETPGPSTEAPGPPGPSTETPGPSGPSTETPGPSGPSTETPGPPGPSTAGTSSTKTYTVPTTPKPPPCCYGCDYPVDCHTSGKDCDYSPLQPPYQSDPYPVGKCVFKNVTCAAPNTGKVLFMKLNND

SEQ ID NO: 171002 - protein, 96 aa, Heterodera glycines; identical to SEQ ID NO: 162270

SEQ ID NO: 171003 - protein, 149 aa, Heterodera glycines
NPKGKSVADYSGSNGFVPANGGGAVQKNRPDRRQILFWRSPFRTLLYFVLELVHIVWDFGGRLFVLRFLLPFLLAFGSLLFLFFVPGAHSSYVRHFEKKLLWCFYWLGLGVLSSIGLGTGLHTFLLYLGPHIARVTLAAFECNSLDFPE

SEQ ID NO: 171004 - protein, 174 aa, Heterodera glycines
KPEKGIGRNHQNPGHPSGASAAGRSVGSGRRLAGATTNSRFRFLQRGFVSGDVPAGQWKHDKFAELYGGGKKRMGGASLGPLKAVKGGAGSSIGARIARNAIERNSGGMVKLQVSNLPGSVVTLDLEELFQDFNVFGVAVHYDEMGNHLGTADLFTDQQSATNILNEFKNIAID

SEQ ID NO: 171005 - protein, 45 aa, Heterodera glycines
FRTLVLKVVQLVSSRGGPVPNSPYSESYYNSLAVVLQRRDWENPG

SEQ ID NO: 171006 - protein, 100 aa, Heterodera glycines
EETDLEAFSTPLDDQGDNKPCLNVFVLFKHTLEEMNTRNSPLLVSISDQQRIGEARVAKLNHLMEICTREENLERSKRLAQAGGYSFDANAPVPTTFIFS

SEQ ID NO: 171007 - protein, 86 aa, Heterodera glycines; identical to SEQ ID NO: 167599

SEQ ID NO: 171008 - protein, 169 aa, Heterodera glycines
GPPGCRNSARGTSLKPPKCLPRVKRSLQPQEAVSYGPQVREGELVFGVAHIFASFNDTFVHVTDLSGRETITRVTGGMKVKADRDESSPYAAMLAAQDVAVRCKELGITALHIKLRATGGVGPATPGPGAQSALRALARAGMRIGRIEDVTPIPTDSTRRKGGRRGRRL

SEQ ID NO: 171009 - protein, 77 aa, Heterodera glycines
IFLCATNSLVLSALSGRHAFQHGHRPMERQPRKGKHRIRKQFGCLFLRLPHMQQRKKIKGAIGRKTALIFKNFICLQ

SEQ ID NO: 171010 - protein, 91 aa, Heterodera glycines
SAVSNFSNYVSALLIVEVQFPVVVMGPFQHFLLLFLMLSLRLHFLRCHLDLRLALFRECDHVAHVIAQGTRILILGLFEGKHPLRSSLFDE

SEQ ID NO: 171011 - protein, 325 aa, Heterodera glycines
MSNIHTLGGDDDNKSRQRSNSSDDENSDEGRQGFFVGGSDHSGQEVLGPNRNENISADHFFDAIRRAGAERITQEQNEALNMPRQTGGGAGQSHVAFRLGGHGMESERIGGTSATAGGTTRQQAPVVVRLVFWNNGFTVDDGPLRQFQDPQNREFLQAVVTKRIPAELTMAAPGREIDLRIEKKGTEYEQPKTKAFSGQGNQLGTITPNVGGSADVVFVDAPPKLSAEETAKLVEQAQAELKEDDNLPTTRIQIRIPDTARPIVARLNQGHTVNQLRIFIVTADPSLAYRPFRLMTSYPTQPIDDEGLSVKDAGLLNATVLVKFE

SEQ ID NO: 171012 - protein, 37 aa, Heterodera glycines
MLSQYFAQKLYLCPHNRQRFDKKLLYCEKKKKKKKKK

SEQ ID NO: 171013 - protein, 172 aa, Heterodera glycines
MAASTPFATSAAPAPSRSKAPLGQATHSVDKNALGFDFNKLVLYLYQTVPQFIAPLRIEKFALGQSNPTFFLVDGREQKYVLRKKPAGALLSPTAHAVEREYKVLHGLGTCGHVPVPRVYTLCMDSSVIGTPFYVMEFVKGRIFPSPALPEIPATERRAYWEAAIRTLARLH

SEQ ID NO: 171014 - protein, 238 aa, Heterodera glycines
MGAIFENIALHDFLVKEVINSFPDKKSIFLLLAKSDEKALLICNKQAFEEEVANVSDWLVKSKLRYIDSNDRFGNFEMALPSESNQIKVTFIYPATEWDIEKYSRQTPFFIYETPGDYQNITFDYLSENDYLKPLQWGYNFLRKKVSRSELGFEDEDKQNGFWSCAQFKMERDLCWMIFILLEIGNSPCFGSVRGLTSQQFPLFGKFSGPIRQFFQKKYGVGPKSLENGFPYPPNFYH

SEQ ID NO: 171015 - protein, 105 aa, Heterodera glycines
PLATASDDATARVWDFARCAEERVMRGHGADVRSVDWHPTKGLLATGSRDSQQPVKLWDVKTGQCLATLHDHKNSVMAVQWNRNGNWLLTGSRDHVIKMYDVRMM

SEQ ID NO: 171016 - protein, 93 aa, Heterodera glycines
ENERHFRNPFLENVADGARAVSREWLLQKLETLTERIASRKIRAEENGKVGPYVGPSGIAYSLIKASRKLNQSQSNLSDYIRTLLATESDYDA

SEQ ID NO: 171017 - protein, 46 aa, Heterodera glycines; identical to SEQ ID NO: 167583

SEQ ID NO: 171018 - protein, 164 aa, Heterodera glycines
MKIEELNDLDAENFVSKLGKIFENSAWVVQEAYGERPFEGVDQLFNAMERVLMNAGREKQLKLIQAHPDLAGNEMFSGNLTQHSTSEQANAGLNALTAQQLSEFNSLNSAYKSRFNFPFIIALRDQKEGIDGILAAFRLRLNNSEEQEINEALSQIGRIARHRL

SEQ ID NO: 171019 - protein, 209 aa, Heterodera glycines
HRQGGTGQRRAVERALRMPRRRLENFWRSIGMHSRSAKRQQCVRVAEQRIVRIAQSMHFLVFPTTNAEQTAVDKMGEVQLSKCAEQTAKIVDRVRVHRHSLCAGGAAGPSSFCCPSSFSSLSISNPPIAHYHNHHQQPKQHFHQQQQQLSFISAPCALHSSHGPSTTTANAIPAQLFMLSKNGRECSKLREMVSSLGEQLNVPSTTKIS

SEQ ID NO: 171020 - protein, 153 aa, Heterodera glycines
MGNEHSPGRFGGNGTNKEKGDDDGGQTSPSTSTGIPASFSFLAKKRNSTKSALMGSIVVVNEGASCSSSADPGKDVDLRRIKEIPRFLPLLRGVLPGHRDIPEAQQKIDSKSILSFMHRLQQHFKSCAQTVATEQGRMFARIVEIDQLISSLF

SEQ ID NO: 171021 - protein, 92 aa, Heterodera glycines
MNSATMFTLLLIIGTVLALTIGMPTPGGSDESVASMRQKRGYGMSNGGGMGNGFGGGMGNGFGGGMGNGFGGGMGNGFGGGMGNGFGGGMGG

SEQ ID NO: 171022 - protein, 87 aa, Heterodera glycines; identical to SEQ ID NO: 167576

SEQ ID NO: 171023 - protein, 213 aa, Heterodera glycines
  unsure (1)..(213): unsure at all Xaa locations
KENDGKAMGXSANGFVAFGCERKRMGEEENGGKVFYLLLTTRLNKGHPRKIKLSHFYRLFDKMKRNGMATFQFADPNLTVYVSQADPKALCQFLLHLYGLLRHAVDANIRCSAPSCSSPANVPSSPPPIATVSTVHRQCTSAIASAKPTKICIQSRQEYQSMIRQASSANLQRLDIVGIGFRAVDIRWFGMRRLQQLSLAANKLGSDEWCTER

SEQ ID NO: 171024 - protein, 188 aa, Heterodera glycines
MPHIEIPPLRKYEYTFEHEKAAIFRWEKERRSERVEEETEQTQQMRKQRQRHMEEKGTKKDGERERAEEGQRRTERRRDNTLNNPEYRNGECFKIESHSLPSSNVSKPNQPPHFASSSLLKPVPMSKSSSNSLHVGIASTQNGNMLQKSTNNNTLNGLEEFEPRRDLFDLLELRSLDARKELEKFFDL

SEQ ID NO: 171025 - protein, 152 aa, Heterodera glycines
PLIVNPIRNIFVRNFACQFGPSELARSYVTDGPLTVSGRSAPVKKRTNAADEIARTKFELLEPIAVTDLPRAQQRFARQIHRSNRTRVQKIFAKNIKMIKNGLAGIALVVAIYLYTFFVMRKETFLEEIDEEMAIERGEMKLDDQGRLVAVK

SEQ ID NO: 171026 - protein, 102 aa, Heterodera glycines; identical to SEQ ID NO: 167559

SEQ ID NO: 171027 - protein, 136 aa, Heterodera glycines
VHRRKFTSECEGQGGLSWCYICNTDGCNKSWKNSTFSSTTPTSTSTTTNKLSSTPLAEIKNKLQCLAWNICNLSTKLKQSKVSRRFSIGQNCEEMAKDWGQIEEDEKIGDEYDQSADEDGQVFLADFFVGRINAKI

SEQ ID NO: 171028 - protein, 208 aa, Heterodera glycines; identical to SEQ ID NO: 162247

SEQ ID NO: 171029 - protein, 191 aa, Heterodera glycines
MGGAAPGTCVLLLGGKDNPRYNTDTTDSPFRQESYFFWAFGVHEPDCFAAVDVESGKSAIFPPKMSPDSAIWDGKIQPEKWFLDKYKVDHVNFQTNGAEIGQFLHKLFNAKKLLLLKAENTDSGNVLEPAKFPGMDSFSTDLASLYPTMAELRVIKTELELAVLRYASKIANEAHKEVMRHVRPEMYEYQL

SEQ ID NO: 171030 - protein, 151 aa, Heterodera glycines
MDESLGNKRPNSTVKEDDSVSLCGSVATTAAGDGSLLDFGLDEETLAVESDTEFERKFFVMKEGSFPGKVFALPHPASRERALYLLNEHGELFELLRLDNGKRSFFFFDSVVANGSVHLFFPVHPFFLAIECLQRNASEHFLTASELLEDD

SEQ ID NO: 171031 - protein, 75 aa, Heterodera glycines
  unsure (1)..(75): unsure at all Xaa locations
NFFFNLNLGFGLLEFWICFIPIFFLISQIIPSIFLLFFFNFSNTSSDLTIKVVGHQXYXSYEIGDKVGFFFDSFI

SEQ ID NO: 171032 - protein, 104 aa, Heterodera glycines
ENIIYDKTKSEKQNKRGEEIMPRAKPNRGKGTTHFGTLFFHPKYPRGHHFAEEVKPKEELVQAVRLLLRLLFASSIFSHFLFFPLSHPPRFLRSPPFPFSFLYC

SEQ ID NO: 171033 - protein, 255 aa, Heterodera glycines
MFLSNFVAQTLPTMTEEWKDAVLYAPYQKEQALMYQYADTLAVRAFLMMADLSFVLEQRPNAEFMSPTGEVPFLRLQNTLVAEFFPIVDLVGKKGIRPSNTLSAAEQADIQAFCSLIEETLRNAEKYLSWLDDESYELVTKKRYGSVYLWPLNWLLPTLKRREMHNYLADIGWADLPIAKVAERCDKCFHALSIKLGQQQFFVGDQPTELDALAFGHLYTLLTTEMPNKAIVETLSKYPNLIAFCQTIDKEYFSQ

SEQ ID NO: 171034 - protein, 140 aa, Heterodera glycines
MSNFGYGQQQGQAYHPQGANPYQQQPGWNVPPPPQGQQPYNAQHFAEQGQAGMPKNELGFNDQTIRSQFVRKVFSTVGIMLAVVAVMSAFPFMHPPMMAFVRHNVGLYLLGYITFFVVYIALICCEGVRRSFPANIILLG

SEQ ID NO: 171035 - protein, 72 aa, Heterodera glycines
  unsure (1)..(72): unsure at all Xaa locations
LFSPPLLLRLNLNFILGLNIVYTILFSFVPSLSIISPSSFPIFIVFFSAGASVYSRHRLFQFLITCIKYLIX

SEQ ID NO: 171036 - protein, 72 aa, Heterodera glycines; identical to SEQ ID NO: 167537

SEQ ID NO: 171037 - protein, 69 aa, Heterodera glycines; identical to SEQ ID NO: 167532
  unsure (1)..(69): unsure at all Xaa locations

SEQ ID NO: 171038 - protein, 90 aa, Heterodera glycines; identical to SEQ ID NO: 162398

SEQ ID NO: 171039 - protein, 61 aa, Heterodera glycines; identical to SEQ ID NO: 167524

SEQ ID NO: 171040 - protein, 225 aa, Heterodera glycines
MKPDLKDPYFMYKLIVGQLFYDGHQQLALNLAQTLGLSLRPPPPSDKLFRLVAIAKQFVEDPESKERETILQVGGFESAGLDLEFDADVVPTSPEPSLYETVYLTTHKAPCRAAAFSPDGALVATASNDCSIKILDVDKIISRIDVTLSESGPDAHHPVIRTLYDHLDEVTCVAFHPRESVLLSGSNDFTLKMFDYSKTAGKRAMKTITEVKAIPAVSFHPSGEF

SEQ ID NO: 171041 - protein, 103 aa, Heterodera glycines; identical to SEQ ID NO: 167518

SEQ ID NO: 171042 - protein, 113 aa, Heterodera glycines
IIDNDMPEGPGRRLRKNVANVRKHIDYIANALNHMEGSLWEEPDRSQLRWERRGIKGDIRYQGNGLRPRLTTKVPEERRLEEIRARRDEAKGRERIKTVSWTTGGQTSRLAAA

SEQ ID NO: 171043 - protein, 67 aa, Heterodera glycines
LLSSSSSSCFCFCVAFTAPQQMAESERFQSAVEERADEKKSSDWSANRSTKGQQVNAVLNCSGGGGN

SEQ ID NO: 171044 - protein, 154 aa, Heterodera glycines
MKYTDSKIHDGKTNTQSDTETKNLLDDMGEEMDDDLSILHEMNCRSKQNGSSELDSKLFELSDEQLNYYTNCFLFLMQKSQGFFSLQGALQGNDRTILDFFRKSSLDDSILSKIWSLSDVNEDGFLNLTEFILAMHLVVLHTKGSVPIPSRLPS

SEQ ID NO: 171045 - protein, 128 aa, Heterodera glycines
KGPKSQKNETEKPPQQKQPQEKPGAQQDDTETEEDSKEDKRKPIKCQEERKCYAHSECGARSKCKPATLDRKKKVGTCDCGVCGGFQLLLLCSLNSGALSLDKNIVPRECAGLKDACVEKPLFVGSKS

SEQ ID NO: 171046 - protein, 31 aa, Heterodera glycines; identical to SEQ ID NO: 167504

SEQ ID NO: 171047 - protein, 66 aa, Heterodera glycines
QMRFSLPWGARVYNELRILHRIKWYFSLFSRAYFFTLFLCFSPLSYSEFAYLCPGGAEFGAGYWAI

SEQ ID NO: 171048 - protein, 141 aa, Heterodera glycines
SYMLPHLHNGWQVDQAILAEEDRVVLIRFGHDWDPSCMRMDETLYKIANKVKNFAVIYLVDISEVPDFNKMYELYDPVTAMFFFRNKHIMIDLGTGNNNKINWPMHDGQELIDIIETVYRGARKGRGLVISPKDYSTKYKY

SEQ ID NO: 171049 - protein, 64 aa, Heterodera glycines
  unsure (1)..(64): unsure at all Xaa locations
GXKKKNPXLSXPSKEETSESCNDACHMFIAYAIRCNRRTERETGLQNRSYVTLSVKKPKKRRKL

SEQ ID NO: 171050 - protein, 73 aa, Heterodera glycines
CSNLDPALINVLLDDVQLLTDSQTDNDTLLFPIVKAFRQLHAQLKEELSCVLSGQIGSEPKPFTLLSILEKQP

SEQ ID NO: 171051 - protein, 144 aa, Heterodera glycines
IVTRLTIGRIGYRAPPRVFFFFFFFFFFFFFLMCFFYCAFKKDYICTFFKFIFIKSFKSVVVVVREASLNAVSVRTFKESNKLANSDLSACFHGNSSARVVHILSHHLLRLPSSFVCFNNLNNSHFYNCFAHFGSNLWNSDYEL

SEQ ID NO: 171052 - protein, 78 aa, Heterodera glycines; identical to SEQ ID NO: 167491

SEQ ID NO: 171053 - protein, 73 aa, Heterodera glycines
NLNEKRRSAVVELDSLNTGAAVVRHAQAMLIVRAGNYVCQFSTCSASVWALPHAEIKTEKKAAAKEGSDIFFF

SEQ ID NO: 171054 - protein, 122 aa, Heterodera glycines; identical to SEQ ID NO: 167489

SEQ ID NO: 171055 - protein, 82 aa, Heterodera glycines; identical to SEQ ID NO: 167485

SEQ ID NO: 171056 - protein, 155 aa, Heterodera glycines
ALMLTLSVQPTPVVRFTRYMTTPVFDDELHHLIWTEMHWLRDRNYIMWVRLVLDGLRALIVDRHNTLGIGPAQQLAAANKKCASHGFVIFSAFIAVLCSIVGTMCAPLLWHKCCERFGPIVGKPSLPFPMVRFNNERDIGPYTTTNNGHQQQQQQ

SEQ ID NO: 171057 - protein, 99 aa, Heterodera glycines
CLLLVEWAFQGFIYQKLMQGRDSTYRYFGKAYYIKFILNVLCHLVGWAFTIHSVLYPKFETQLVRHLRLKITGTVRLERMETRSSHVIQLQKQNRWLIT

SEQ ID NO: 171058 - protein, 203 aa, Heterodera glycines
  unsure (1)..(203): unsure at all Xaa locations
KNPPSAGDPRSWRDFIKWKWDAKSTKLPNLKVLDQTLPVLKPRFQTDSRLSATWLGHATLFVRIDGISVLTDPCKFRQNFQXVWAMFATPSFLPFFKFCPRFRPPPCKIEELPKIDIVLISHNHYDHLDVVAVRELAQHFPHIIWVVPLGLKQLVQHETNSKAVHEMNWGDRLELQLNERTFEVFSVPAQHWSQRNLIDRNTS

SEQ ID NO: 171059 - protein, 234 aa, Heterodera glycines
FHIHLQKERSFAEPRLRGYAAEVASALGYLHAKDIIYRDLKPENLLLDRNGHVVLTDFGLCKEHVKMRQTTSTFCGTPEYLAPEVIQKKPYDRTVDWWCLGCVLFEMLFGLPPFYGKNQNEMYHKTLTQPLCVPSSASTLVRKLLVEILHKDRSERLGAKSDFEEIRSHPFFAPIDWDKLLNKEVKAPFVPKVRAETDTLNIAREFTDIEPNPASLVPLQTFVNRETEFAGFTY

SEQ ID NO: 171060 - protein, 86 aa, Heterodera glycines
LCILFCNLCLFGSPFRHWRCLFVALFDRSADDTSNFDSEFTGEAPKLTPVDRLFLMNLDQNEFEGFTFVNAEFTPQGENKTADKTI

SEQ ID NO: 171061 - protein, 139 aa, Heterodera glycines
MSMSSTSAASASATDAEAQVEFPIVCEPCLGTNPYMRMTRQPQGAQCKSCSRPFTTFRWSPGPGQRTRRTEICTSCAKLKNACQSCILDLEFGLSTRVRDAVLGLDSGANTSNDHNRQWLLRAAEQNLAKTGSGMVDYG

SEQ ID NO: 171062 - protein, 85 aa, Heterodera glycines
QFIFLLALLPFLLVPICCEQCSWDDVNNICVGDCSSLCVLKDFDNCNCNRLPKNLQFFKNRRNFGNLKALAKKEETNNGKLMYKK

SEQ ID NO: 171063 - protein, 125 aa, Heterodera glycines
GNERFRCPEALFQPSFLGMESAGIHETSYNSIMKCDIDIRKDLYANTVLSGGSTMYPGIADRMQKEITALAPSTMKIKIIAPPERKYSVWIGGSILASLSTFQQMWISKSEYDESGPSIVHRKCF

SEQ ID NO: 171064 - protein, 176 aa, Heterodera glycines
LPLVDPPGCRYKNEGLVSKAGSLMALAKCPPSTVQILGAEKALFRALKTKKDTPKYGIIYHAQLVTQAGQKSKGKIARKLAAKVSLATRVDALCDESLGNGQGIEARVYIEQAIKEADARGGAKKQRFSGVKQAPKGAYTFKKGEVHHYDAKFDMTLKKGTEQAEEPQQEEQQSGK

SEQ ID NO: 171065 - protein, 148 aa, Heterodera glycines; identical to SEQ ID NO: 163796

SEQ ID NO: 171066 - protein, 216 aa, Heterodera glycines; identical to SEQ ID NO: 167475

SEQ ID NO: 171067 - protein, 152 aa, Heterodera glycines
PKQQLCALFRSSIPLLEPRIGCYSVLAQMSTEVEKAQKAKPGGDTIFGKIIRKEMPSTILYEDDEVLAFKDINPEAPVHFLVIPKKCITALSNSEEQDQAVLGKLLLTANNVAKAQGLSNGYRIVINNGRHGCQRTSGTFLHTLLEKFGYFK

SEQ ID NO: 171068 - protein, 96 aa, Heterodera glycines
NGNKIGICRRAFAIFNGKRETEAENDNISTVRQLLRWLSDGPLRGNDRSEMLIQRDTVRPGVLVLINDTDWEILGGLDAQLNGGDKVTFISTLHGG

SEQ ID NO: 171069 - protein, 162 aa, Heterodera glycines
VSLQAEREYITRRVLTFVELKETVCAGGDQGFVVINQKGIDPPSLDLLAQHGILALRRAKRRNMERLQLACGGEAVNSVDDLTPDVLGWAGSVYEHVLGEDKYTFVEECTNALKDGAVLPGAGAFEIAGYCALKKLADNVKGRAKLGVLAFAEALLVIPKTL

SEQ ID NO: 171070 - protein, 72 aa, Heterodera glycines
CSSRLSVQISHQSPFHRQIRRQIHRRRSHNAFAEVEHFQFDCPLLAWQLLMKGKWQLSAEEQKWWTKKTFSV

SEQ ID NO: 171071 - protein, 152 aa, Heterodera glycines; identical to SEQ ID NO: 157867

SEQ ID NO: 171072 - protein, 31 aa, Heterodera glycines
  unsure (1)..(31): unsure at all Xaa locations
PPPACPPPPSXPPPPPPPXPPLPPPPPPPPP

SEQ ID NO: 171073 - protein, 38 aa, Heterodera glycines
FLLLALWTNVPFLQASFVIFDHFQYLPAFVSFTLLSMF

SEQ ID NO: 171074 - protein, 42 aa, Heterodera glycines; identical to SEQ ID NO: 167462

SEQ ID NO: 171075 - protein, 44 aa, Heterodera glycines; identical to SEQ ID NO: 167461

SEQ ID NO: 171076 - protein, 176 aa, Heterodera glycines
FFISGVRACQRISMHPYKHQLAAANECCFIYPFPAYGLSSRQLMRVLSAWLMPSFSADEEGPSMNVPSCFSDIDSSFECASFSVPMVFSHDEWFVQCVPALGEQLDKLLLLSQHHFFIGRKLMPPTTTEYGRRRGVSCATGAAPFARVDHPNSDADTAQGRNATVHCGFRHFAPLV

SEQ ID NO: 171077 - protein, 138 aa, Heterodera glycines; identical to SEQ ID NO: 163938

SEQ ID NO: 171078 - protein, 161 aa, Heterodera glycines
PVVGGAVPPLPTAVSVAVLWCAVIITAAFRRPLTNGMYAVARTAFRKYSIASANWWPKARSACTVVVSLNSFRPMPWADVPLCSADNDATPSAVPSALLLGVSGSKRRNGLSKGERISGGPHSEWEEKSEEQTMPFTIRLPAVLVEQNAAIIVKSAEIQTA

SEQ ID NO: 171079 - protein, 110 aa, Heterodera glycines
SVQVEIQWKQCLYNPIVAPFADVGSYPIFTDEFKGTRKCTLDVYVQGNLEHLDDKVVFLTVHDVGKTYLSCVDLANSPTLSPLVGQRAVFLHVSVPGQAPGAENFVGDFP

SEQ ID NO: 171080 - protein, 41 aa, Heterodera glycines
PIQIVTSHFLLIIFFQNNFFFFGLYEPSPRSDAPRFMGRAN

SEQ ID NO: 171081 - protein, 222 aa, Heterodera glycines
MKSGYQRELTYRRPDNSFSAFGESDQHGSTWLTAFVLRSFKQAQAYIFVDDRVLEDSIAFLISQQLDNGAFVERGEVHHKLMQGGASEGGFTLTAYVLIALLENHVQNKVTELARSYLESHLTDFKEDPYALALCTYVLHLANSPKKGDVLKMLEGLQITGATDGMVHWTTKVSNGAKDGTGGAAKNGGGAARDTNQYFFQPQPADVEMSAYALLTYMLLDN

SEQ ID NO: 171082 - protein, 205 aa, Heterodera glycines
MPLAEQLLSDYPGICHKPAWPLPDKQKLGEFREREAEICGRNRENFLALAEKLLTIAKDENLHWRQVDFAETLLSLLLRKDCDLPDGVVLHFFKRLTAATINIRKIAIDFCSSWLKIHRQKAVKEDVVIPDCPPGRGPGAQWPITFGIRSDNKFLLFDAANAPSNADKWDSANFHSKVYPGFYTWPSKFRVYAPPSEQKWANREF

SEQ ID NO: 171083 - protein, 147 aa, Heterodera glycines
MTMRYFSGRKRHQGVLCVFKKGFRISVSAGNKPSPACGPMDVILKASTGCAAFLLPYGKTAHSTFSLVRDVSLDRLPSIPLESFFPRRIREAQLIIIDEITMLHSTVIEVIDRVCKEFPIATSRVLRRKDPHCSGTWNSPSCRICSP

SEQ ID NO: 171084 - protein, 255 aa, Heterodera glycines
AEPLGIGSVWGAGDAALCSDSYPPAMFVQDPCTRLETSAEGELVPQRRERYVFRPVLLRVLETYFQKCPFPDIAKRVEIANACNAHLQVDKRGVQLMPKEVVTPQVIANWFANKRKEMRRRMGGTEAGRSRLNSLSAGRSNSPSSPNSAAHSREGPFELRQNNQQSGNVDEAVLAHCDFLQAMPMSVPTASNQQQMLLISDQPESVPSAADLALVLPPLGPPHHPNCCPPATPLLPPNVVQFCPSVDQQLLHLLQ

SEQ ID NO: 171085 - protein, 160 aa, Heterodera glycines
LRDCYVIFLSKFLCLENDKKISVNNRSLPQQNDTFLQIEQCVREMLLEKESRRDLFHCSLRPALGHFVALLLHSFGNDSDVNLRLRSGEFLCLLTQLDFADESADFVAFVLPGVFSGCRQILLNVLPNLHSIDLVRCACELVTNSICISFSKINVTDCLS

SEQ ID NO: 171086 - protein, 138 aa, Heterodera glycines
MTLTMDELRNKVQNGQISTVVVGSVDLHGRLIGKRLTARHFVEMAQKKDKMSMCYYFLAMTIEGHVAEGFEVARWENGFGNGLLQLDFGTLCRTPWMEKTALIMADMHDHRDLPFFCAPRTILRRQLQKLSEKGFRAK

SEQ ID NO: 171087 - protein, 46 aa, Heterodera glycines
QHSSTLSCDFERRKAGLQQRWGRRVFELRPEVFICCYIMPKLFSKF

SEQ ID NO: 171088 - protein, 31 aa, Heterodera glycines
PIGDPSVGQIFSFYLKFAFFPSGQFVVTERK

SEQ ID NO: 171089 - protein, 126 aa, Heterodera glycines
VGSLRGGGWRLELSAGGLRWSADGEGFVFPGRGTKKFVGKREGTNWGGGEETERDTLKKRRRRKAETTRKGRRSGRARREGRMTPNDGSDWRGVGVPAVSHLAVPQILSCDQKEGLLNNLLRDGII

SEQ ID NO: 171090 - protein, 141 aa, Heterodera glycines
FGKEPQKSTKTFLRGIGFQGRRRSDDEFINDDSDSDYTPSAKKKGIVGKRIGRAKKRKRLLFPPNNRPKMKIRQMSSSSDDENELQLSDTDCEAGPSSRKKSKAPKSQMHHRKWGPKASSSEEEDDEDEETLGDKRGGQSH

SEQ ID NO: 171091 - protein, 137 aa, Heterodera glycines
FQLIKLCKFLLISATSSFLWSNCAFPFDQFPHFFDLSANISFGQCHSPFYCLIKIARNPSNYLHPFPNLFLISPTLRGSQMAPFSQSVPSLFLIKCAHSLLISAISPFFSSSNCPNLFWSIVFWLFLLISVTPLHLY

SEQ ID NO: 171092 - protein, 140 aa, Heterodera glycines
GPFTEYVNANLTLSNPSRKDVYFKVKTTAPKFYCVRPNSGVIKANDKTQINVMLQPVESPETLESERSRHKFMIQTAFAPDDEQLPVDQFWKTVDPTLVMDSKLRVVFQRPFGFGDENNRDETNATGPFFNFNKTGEPKN

SEQ ID NO: 171093 - protein, 89 aa, Heterodera glycines; identical to SEQ ID NO: 164000

SEQ ID NO: 171094 - protein, 49 aa, Heterodera glycines
HFEKKPDLLDKKSRPRKNPCSLKKGLDLGQENYRPEYRFKSNSKNFLLI

SEQ ID NO: 171095 - protein, 127 aa, Heterodera glycines; identical to SEQ ID NO: 125714

SEQ ID NO: 171096 - protein, 52 aa, Heterodera glycines
VFPFNQTIFKTQIGVQSYNFGIYESVVEKMLKLARFCGSAVANVGTILRRTK

SEQ ID NO: 171097 - protein, 166 aa, Heterodera glycines
MGSKRRFLLHFSQAHQTFRRAEFDAICQIKGISVVPNSPSDGIHIQSFEFQNDEFDVFRLLERAVLVKAAYELIAEGDGHEQVMAKLASDPSSSLARFDSADQSWSLLVRPHQKKRSGDYARSVVERYTAIPLLTLAPVDLAHPSNVFSVIEMYEANGRRETPDKV

SEQ ID NO: 171098 - protein, 73 aa, Heterodera glycines
LTLSCKHSVYIQIRFFLLDEADSLLGGQSDSAQIVHELHSRIPKYSEFGERFQMIVCSATLHNMAVQRLAVGR

SEQ ID NO: 171099 - protein, 50 aa, Heterodera glycines
PRPYLRRCPSRAVRETTTKCRPKNRPRRHSRPKRPLMYGHAIVNYYLFAV

SEQ ID NO: 171100 - protein, 104 aa, Heterodera glycines; identical to SEQ ID NO: 167395

SEQ ID NO: 171101 - protein, 53 aa, Heterodera glycines
LMPSKMERLLKTVILKDSWFQVDPNFVDDVGQTLLNKVLLSAPPTWSFTFRER

SEQ ID NO: 171102 - protein, 269 aa, Heterodera glycines
EAVETVGTDGHRTSPPSWQEPSGHQPTSSASGAAHALPPSSSNRPIRSQRTPMKEIITLDDPTELDEFMARGEEQCIHAMRAFITQFSLRQTTVATMTGVSQPYISKLLNGNHRELSLRCRKNIYCWYLNCRRHPEKLAMFVQDPCTRLETSAEGELVPQRRERYVFRPVLLRVLETYFQKCPFPDIAKRVEIANACNAHLQVDKRGVQLMPKEVVTPQVIANWFANKRKEMRRRMGGTEAGRSRLNSLSAGRSNSPSSPNSAAHSREG

SEQ ID NO: 171103 - protein, 63 aa, Heterodera glycines; identical to SEQ ID NO: 167238

SEQ ID NO: 171104 - protein, 96 aa, Heterodera glycines
KFHPIFCIIFSISVCLTAVNSQKSSSKVEHFGRRPNGKETPSRTFVRNCSLCSKRTCPREHLPLVPCFMQINATSCFIMAENLGFSMILDVSAFFF

SEQ ID NO: 171105 - protein, 76 aa, Heterodera glycines
GKLGEELPRHETNDGSEEVIRVTVKTIYEVTVCHKINWHLLYVRFAKKSAAIQSKKMVKRQVDSTSTALALYCKNC

SEQ ID NO: 171106 - protein, 248 aa, Heterodera glycines; identical to SEQ ID NO: 163910
  unsure (1)..(248): unsure at all Xaa locations

SEQ ID NO: 171107 - protein, 37 aa, Heterodera glycines
KAKMIPNYELKWHIWPFKLCLVSIYRFKSDHNNRHVC

SEQ ID NO: 171108 - protein, 181 aa, Heterodera glycines
  unsure (1)..(181): unsure at all Xaa locations
RPRLAPGPPRSSPLPSRAPLPSPVPLAAKGAGSLLTSSQLPAGLAXHCRAPRLPLPLRGASSPPASPLPPPSLTLLPASPEGAARAEVAPSARRTPXTGATXILLSAHRLPLRMTPALLPPPLPFLPPAVPPLRLPAPAPLLWAVPVPARSLHPRQCFPPQPLRRNIAIPLQTWRWGEGQK

SEQ ID NO: 171109 - protein, 55 aa, Heterodera glycines
NPLNLFTSNQGLEESRNIVLDYRKGIFSPELTVERLWKAKHLYGNLFMYFFLIGL

SEQ ID NO: 171110 - protein, 126 aa, Heterodera glycines
  unsure (1)..(126): unsure at all Xaa locations
MSSGDEATTPALTSGGGASSTRTAGGGSAFQRWGGNRRGSHLVGWDSARPQSAARQQQQMLERMYSKSELHEYQQLFKMFDTDGSGAIGCEELKGAMLSIGLQADDAEIERLIKEVDXHGNGSIDM

SEQ ID NO: 171111 - protein, 273 aa, Heterodera glycines
MIGFDPTNEQNSGQQLFMGEIGQRINNLIKFNIGPKWMSLNFAALFFRFFGFPSEAANCLEAALTFPQFLDISLTQLAQLLLHLNPPMENAKKENDGIERILRIAMQKGENEPVPFHLMGIFHLRQNRSVLAYRFFREALDRDPNFEPALNELLRMKCTQRVGKKPRLIRDIYAPICCWPNEQNVVCFERRAKGSVWRESVRCFRLESPPVSSGGEFPAVHFVYFRCNTPYTGRSYPPPPFAPLVAPLLRPAGRNCVKLNFVDSSNKSRLRNH

SEQ ID NO: 171112 - protein, 51 aa, Heterodera glycines
PPPPPFFSLSPGPRGRYFRPFPRPLFPAGVFFIFFFPPPPYFGTPPPPEAG

SEQ ID NO: 171113 - protein, 70 aa, Heterodera glycines
KVLFALALNLSFSSFCAFFLWVVFIDCIGIGIAIATALWFISNRFLRRTRDCDVVEWAYCFDVHLNEIRN

SEQ ID NO: 171114 - protein, 172 aa, Heterodera glycines
LLRGTNVGGGGGNASRSIGEVIVPRTSVGIIIGKGGETIKRLAAETGAKIQFRPDDPNLQERCAVIQGTPEQINRATQMISELVTRSSGGGGQQETFYMHVPANKTGLVIGKGGDTIKQISAETGAHVELSRDSPPNSTEKIFVIKVGDVAPGTPLPSFHGNAGITNATTPL

SEQ ID NO: 171115 - protein, 140 aa, Heterodera glycines
ETRQQKSLRGRLGIGTYELATDEAPIGNKKSGSERCGGICIIDPTDLLPIERYIRLPSGVFRLVKVPTNAITPLLTSEVNDNSAAVATLTDGRLALFTTDHFDSIADVSATFLPFSTTLSSGMMLDCAVNSDGRLLCSDK

SEQ ID NO: 171116 - protein, 174 aa, Heterodera glycines
HDVERDQTVAENVLKLHRYRPQGESVGAVQVFGTAMEVRTTFDAEKGDSHGRMEVYENIREWTAVEEGQKILSTQFMRKYIHTARDVKPKLTDEASTFISERYAELRSTDLIKTDCERTMPFTARQLETMIRLSTAMAKARLSKTVGLEDAKSAYELLDFACFKEKPRERLEYE

SEQ ID NO: 171117 - protein, 231 aa, Heterodera glycines
MKIQAGHRYEIGDQTGKTYIVTGATSGIGKTIATELAMKNAEVVMACRNRNKCLEVRRDIVLNTRNKKVFCRMCDLSDMESVHEFVRKMTKGKYDFKKIDGVILNAATKSKKYSTNKDGVETNLATNHLGSFLLVGLLLQKLLDQDGQSRIVFVGTDIATKNSLKLELGKLNTAKYTNKFLRSTEKLDIEKGKYDMHGAYKFSKLTQLVFARELAERLEGNNKIRAVVADP

SEQ ID NO: 171118 - protein, 51 aa, Heterodera glycines
SLPSSSRFVTHDLERGNQFQRRVDLAFKLQLSNLKLEFGNQIHETFGLVLG

SEQ ID NO: 171119 - protein, 153 aa, Heterodera glycines
NENNGKNNSPAGGHETDNWPTDGLSDGQSADGGQSEGRKSAKDEDVSLASVGVSKFVVVWACLFAPSSVCGIFPILASTRSPMARAWEGLHAGGKADIGGRGEAAEEKRLFSICAGGSVGYARAPFTGFSRRTNSEFPTHKRRNKSLTEKSNR

SEQ ID NO: 171120 - protein, 88 aa, Heterodera glycines
MNFYKSTTFIGLFFIILANSFFDHADDPKLASSFLCCAIVFHFSGQNFPFRHGSVNGHRTAGSFLCECTWGKEKNTGEKSNGQKKEEA

SEQ ID NO: 171121 - protein, 59 aa, Heterodera glycines
MNLPKECDGGGNAQRREDDNVEQQQEAAACSNSEAQQPANDEDEDDDDDGQTNFVCNRQ

SEQ ID NO: 171122 - protein, 40 aa, Heterodera glycines
KRCNPISSGGNSFIQASSKSKMEIRLRAVSPIIISDEVGG

SEQ ID NO: 171123 - protein, 47 aa, Heterodera glycines
RGIYHGIKTERQINETEMSDLINEKTNPSSKVVPLAKVLSRLLPRQE

SEQ ID NO: 171124 - protein, 126 aa, Heterodera glycines
TQLVALPPPMVLPPLCLLLPLIVLLIALFRLPLPLSSNNSRSISDTLWTRITSVSRVFSPPIRIFAALSSLKRPPVSLVFFGHSNVSALFPLLGRKAPEVISEKGYRANVPAWLVPAVDHICSFAV

SEQ ID NO: 171125 - protein, 86 aa, Heterodera glycines; identical to SEQ ID NO: 167289

SEQ ID NO: 171126 - protein, 74 aa, Heterodera glycines
FFGLILFPYQAYWHPNKLLIDQYIQLYPQLKWFFMMWSKWTLVCFYVMGELWPMIVFTLLYWQLANQITTIEEA

SEQ ID NO: 171127 - protein, 112 aa, Heterodera glycines
SYQFITLSTPSFAAFFSVLISAWGKAQTDAEQVEDGHTKLPARTISIACACRTTAAPVFKLSSSTTADRRFSFKFQHISSLGRAEGERSQKQAAENDRKKLGNHFCKLNFRK

SEQ ID NO: 171128 - protein, 29 aa, Heterodera glycines
LACLSLHLISLFILISLCHFCIAIKIHVI

SEQ ID NO: 171129 - protein, 128 aa, Heterodera glycines
TNTFSATKSGWFSFVYVLTSTGNCFSRSCKCQSVGGTRITIVATTVRLALSFGTSGITVTWFGLSTDVGTLVDATASLPALVSGVSQKLDLLAHTLVPVSQKLVLIAQKLVLVSQKTVLQQPIILFSQ

SEQ ID NO: 171130 - protein, 84 aa, Heterodera glycines
CMTQQREKVVVKPRPIAEATRRLERFAVPLMFSAPASVRLASPRRRRPFRAQIYSMRCSDCVRRFPPVARLFPRLRPLHGHRLA

SEQ ID NO: 171131 - protein, 187 aa, Heterodera glycines
FTFPCTIFSCIKIVQQYERAVIFRLGRIRRKAQGPGLFFILPCVDEYRCVDLRTVTCDVPPQQVLSKDSVTVTVDAVVFYRVFNATQAVMMGNISSSTTLLAQTTLRHVFGTKTLSEILGNFNKINREMKLSMDKPSDVWGVEVELVELKNVRLPHDMQRSMAAEAEAGREARAKMVAAEGDHKRPR

SEQ ID NO: 171132 - protein, 36 aa, Heterodera glycines; identical to SEQ ID NO: 167273

SEQ ID NO: 171133 - protein, 88 aa, Heterodera glycines
MTKGTPSFGKRHTKSHTLCKRCGRRAFHNQKKTCAQCGYPSAKLRSFNWSEKAKRRKTTGTGRMRHLKNVNRRFGNGFRSGTPKAASA

SEQ ID NO: 171134 - protein, 151 aa, Heterodera glycines
LVDPRAAGIRHEGHVEDQLFDFYTPSEPKKKKLLHHPSAAASPVGARSSLSGTRIGSLALGSLTLNAAPDLELYSPALPPSASLNAVAPSKYGPSPAANSSARQLLGGGARGGDSVGSVPSAVAPDECPLKKKYAKEAWPAEMRRRSGSIL

SEQ ID NO: 171135 - protein, 70 aa, Heterodera glycines; identical to SEQ ID NO: 167268

SEQ ID NO: 171136 - protein, 154 aa, Heterodera glycines; identical to SEQ ID NO: 163885

SEQ ID NO: 171137 - protein, 289 aa, Heterodera glycines
LLLKLIQAGIVDDWDDPRLFTLTALRRRGVPSETVNKFIAHLGLTVAQSSIDPAMFDAFLRDHLNVTAPRTMAVLEPLRLRITNYRELGFIPAKSTLRVKQFPSSINESTDEWEIAFDEFVYIEQAAFREVAEKSYRRLTLEQPVGLRHVNLAVKIDKLERDEHGNPIELVVTANPVSSECKPKAFIHWVARPVLCEVRLYDKLFVHKNPEDPAEVPGGFLTDINPNSLHVLSNAMVDGSIIRTIRPLDRFQFERNGFFCLDPNDSWSSEKKFVFNRIVSLREDAGKDI

SEQ ID NO: 171138 - protein, 116 aa, Heterodera glycines
ILLNFLIFNYFGSVTFNLGMPSHTLLILCLLFCFALTNGNANSDNDAEDTDIESFVRERCDSACEDPGETSEECAFVCLNCVQTECQHCTNGTESNGGTKEKCQKCFEENKAKCVQ

SEQ ID NO: 171139 - protein, 66 aa, Heterodera glycines
LSPPSSSFCCSSTTRSDGTATTSPAAEGGVSFLSSSAPFSTSPSAPPLPSSSSSSPSAFFGFMNRR

SEQ ID NO: 171140 - protein, 268 aa, Heterodera glycines
APSTSLGAWLQTFNLLSSLVQRIKVPQKQKSVAEDRAMSDQIFTMLQHPARLDFLRVDHPELAAAYEKNPTDKDLFYIAFMKNKEEQTRRVRLMYDHSSEEGQRYIAQEIERERITRMQELAMEHMPEAFIPVHMLYIRMKINNHLVIAFVDSGAQASILSESCARRCDILKYVDRRYRVQAHGIGGSQKMVGRIFACQVQVDDNVFACPFEVMSDRDVDILFGLNAMLRHRCNIDLKKMVLRFGDGTETPFLSEQEVKREKEAIAMA

SEQ ID NO: 171141 - protein, 189 aa, Heterodera glycines
SLLSPTHLLNETSLNLRCPYCPKKFLKNTEAISHMDPCLKSRPYPCTNCSRRFKSAQNLSQHERIHTNVRPYNCQYCEKNFTQKSHLQQHERIHTGEPAFSCRYCGETFNIYSSKIQHEKSICGLHEALDKQKENSSEKNGFAKIVRERSPIGSANSHLKKWPYDKVGTTSSTEQNDADRTIIVTGTSS

SEQ ID NO: 171142 - protein, 57 aa, Heterodera glycines; identical to SEQ ID NO: 167253

SEQ ID NO: 171143 - protein, 190 aa, Heterodera glycines
MENTGTADESADGPLGAFWEWHRMVAGADKFGSISQRMLHLRPSLKVPSVSKRIAFPSTAFPNPNPNNAIPPPNVVRRRAHNIPRDKPPCLRPMDRPFREHRTYPRSWEMPGFEATIPRQWDWRNVSGTNFCSPNRNQHIPVYCGGCWVFGTLGSLQDRFNVARKNRWPMTMLSPQEIIACNGRGSCNGG

SEQ ID NO: 171144 - protein, 45 aa, Heterodera glycines
KIAKIYKMPNFLILSCHYGTPTKCPSHEMSKRVKTHEMSKIFQNL

SEQ ID NO: 171145 - protein, 52 aa, Heterodera glycines
PQMVLLKVFSHFLMLFYHFLTRHSLLCHRLFRPQKLLRSFTAFGANPSGTIA

SEQ ID NO: 171146 - protein, 121 aa, Heterodera glycines
MSSRRNEYLDAKIYVGGLPEDATSEELDDAFHRFGRIRKIWVARRPPGFAFVEFEDARDAEDAVLALDGTRICGVKARVELSHGNGRGGGRGFRGGGGRYDDRYGRDRYDRDRDRRYRSRY

SEQ ID NO: 171147 - protein, 115 aa, Heterodera glycines; identical to SEQ ID NO: 167230

SEQ ID NO: 171148 - protein, 80 aa, Heterodera glycines
  unsure (1)..(80): unsure at all Xaa locations
MDAIKKKMQAMKIEKDNAIDRADAAEEKCRQTQERLERVEEELRDTQKKMMATENELDNAHEDXLTAANNLLEENENTVQ

SEQ ID NO: 171149 - protein, 167 aa, Heterodera glycines
MMERRLRSMAANDGTWEERPTNSSLANRPFFKLMEADMGNAQTEMPTSFVAKMSYQWLLPHLWLNDNKSKDKTKAEMDDAHTEMPTSFVAKMSYQWLLPHLWLNDNKSKDKTKAEMDDAHTEMPTSFVAKMSYQWLLPHLWLNDNKSKDKTKAEMDDAQTEMPTSFV

SEQ ID NO: 171150 - protein, 46 aa, Heterodera glycines
AVLEQHRRLIGMEPAEADFVLLETARRCDFYGLRLHPARDIEGGGG

SEQ ID NO: 171151 - protein, 85 aa, Heterodera glycines
NLRSDFRARVWTPDTCEFLIFIHRFQFKFISLFSYHLLSYFYHDLVRVLDKILARDFVVIFLVTDFHGIRYFPGTKTHWISISLV

SEQ ID NO: 171152 - protein, 183 aa, Heterodera glycines
FGPLSAHYEEDDELLTPTKRLRELRLNSDEKCAMSDSIPRAVELFMEKKRARISKFLYTYNGNLQLNLPQLHAFACSTGGLIDDEFRERIWPILVKNLPQAKRCKDTQWDALRSEEYNDQTNHSSDELQQQQQTLFLSDSDFESAFSTFTPSISGCDDQLMDAEDDAEGDDAQRMAPQNATNR

SEQ ID NO: 171153 - protein, 161 aa, Heterodera glycines
FVILSTAPFRLLLLKISSNLLYNFFYFRMLNSCKFPKIILQVCGRGIQKLIWMLKLKHRVEHFGRRPNGKETPSRTFVRNCSLCSKRTCPREHLPLVPCFMQINATSCFIMAENLGFSMILDVSAFFFLIFVVAVWTCLFIFALTPFSELVSFLQFYYFIF

SEQ ID NO: 171154 - protein, 75 aa, Heterodera glycines; identical to SEQ ID NO: 142045

SEQ ID NO: 171155 - protein, 102 aa, Heterodera glycines
  unsure (1)..(102): unsure at all Xaa locations
LYQMKWAHNMPHLGQVWTGVMQSAGASRKAVXYNDRKPDIDTKGISSPDNLDGRIEFQNVHLDNCTLSDNPILLGPSFTVEPGKGEALLTATGRGNTPRIAR

SEQ ID NO: 171156 - protein, 208 aa, Heterodera glycines
  unsure (1)..(208): unsure at all Xaa locations
LNGRAGFLASLLELRLLFGQQLLSDDEIRSVLDAMVSSGRKYSKKHKSPAQLMFEWYNTEYLGAAHGVSGIYQMMLSFWDLLDASAKSDLKQSVDWLLSTQFSDGNFPSSSDRIGLSEELVHWCHGASGVLHLLIVASLVFKEDKYLESAERCVNLIWARGILRKGPGICHGVAGNGYAFLLLFRLTXNDKFLQMAHWFAFVMMAPSF

SEQ ID NO: 171157 - protein, 89 aa, Heterodera glycines; identical to SEQ ID NO: 167113
  unsure (1)..(89): unsure at all Xaa locations

SEQ ID NO: 171158 - protein, 116 aa, Heterodera glycines
IEPDVGCRLHLSGLNWEWHTLDTLRSHFGQFGTIEQLEMVAYPRGCGSLVFDSLNAAQLCLAAGEKHSVNGHSIEVKMVPAGFSPLFSPARPNSSDSALSAASSAPPPPNAPLNLL

SEQ ID NO: 171159 - protein, 51 aa, Heterodera glycines; identical to SEQ ID NO: 138508

SEQ ID NO: 171160 - protein, 116 aa, Heterodera glycines
MTFAFAVLLLLFIPPLTLAKNARAEGPVPVVLWHGMGDSCCNPYSMGFIRKLILTNMPHAYVLSLQLGSSVAEDIGRGYFANMNDEVAAVCQQLAEDARLANGYNAIGFSQGALFV

SEQ ID NO: 171161 - protein, 53 aa, Heterodera glycines; identical to SEQ ID NO: 162349

SEQ ID NO: 171162 - protein, 160 aa, Heterodera glycines
VMLNDTKLESTLSTTIKSIDLQIELPKCLDCLADGLNVTEEAITENGGGTIRFLRSSPPVSVPILPPYILLLHDQTNDANVWRKTLQILSASGFCCVAPHLSNFVFDEEENVNFLLNLTSHIGAREVVLVASSMSGIYLIPFLSRGIKKKDIHFHVKAFI

SEQ ID NO: 171163 - protein, 290 aa, Heterodera glycines
MDLAKAYGAPYDLVEQTLNKRRKMLRKTAKGTSRNIGPKNAKDAAYDHKMIRHKIFPMAAASYGDTENVKNCIRNTFRNATLYRNSVVQCNGKAYELCSAFTAVSHEDKAIILSFRGTDTGYQLIEETIQIALFKRSQSPDEEWGKVGSYFLKIFNQLVEEGKIIDYLAKLVNTYNNYELWVTGHSLGGAMAAIASATIVDAKLISAQRLKLVTFGQPRTGNGEWATAMDQKVGPFNYRVVNNRDLVPHMPPLWFEGYRHHMTEVFYNNAKNKTEEFVICADEAESEECA

SEQ ID NO: 171164 - protein, 106 aa, Heterodera glycines
MMNSTLTLIFHRGPAPTVYAMFNNSVWTFMLVYGVTGRFISASVVSLLTMPATAALWVWEADRDYERWEGSRVLRERRVPKFVLPRTIFDWSDFDYAQQMRKAPTG

SEQ ID NO: 171165 - protein, 102 aa, Heterodera glycines
  unsure (1)..(102): unsure at all Xaa locations
ENREKKFFFPRPNFSHFPIPCANGVITSSFCEIEMGPGYPTGQXXDSWXXNSSPWKVGPTTSRPLFFSGPHHQVIERAEESRGKVHTFEAVKMPILLKLQDR

SEQ ID NO: 171166 - protein, 135 aa, Heterodera glycines
YSLAFYPTNAVKKNKQKSAITQVVGSPPKFAPIRKSANASHSIRSTLPGYASPTEALAPIRTARPCSGPMQQRLDDRALHRAQCPLCYPSPPCKSSPRRALPMEQKRYFPAPMPSSFRWGVLLLRVAAGRDNEVF

SEQ ID NO: 171167 - protein, 158 aa, Heterodera glycines
MLIRSRQQLCALFRSSIRLLKPRIGCYSVLAQMSTEVEKAQKAKPGGDTIFGKIIRKEMPSTILYEDDEVLAFKDINPEAPVHFLVIPKKCITALSNSEEQDQAVLGKLLLTANNVAKAQGLSNGYRIVINNGRHGCQSVYHLHLHVLGGRQLGWPPG

SEQ ID NO: 171168 - protein, 180 aa, Heterodera glycines
QDTAVTHELPISLEDLCKGCTKKMKITKKIVNPDGTSRTEDKVLTINVKPGWKSGTRITFPKEGDVFPNRMPADITFVIKDKPHPKFRRDGSDIRYKQVVPLRDALCGMSIKVPTLEGDIIPLNIKHVTKPGSTQRIHDRGIPNPKTGKRGDLVVEFDVRFPDSIAPAARELIANALPPN

SEQ ID NO: 171169 - protein, 142 aa, Heterodera glycines
MTTITPQQKPILKAVILVGGAQKGTRFRPLSLQLPKPLFPVAGVPLIEHHISQLCEQLENLHEIFIVGFYPAEQFANFISDCEKKYRRVPIRYIQENCPLGTAGGLLQYKDILIDRKPPDALFVLNADACGEFPFLEMVELN

SEQ ID NO: 171170 - protein, 169 aa, Heterodera glycines
QLSNLFDSFTAFADNYAQVLRERWHLGECGEDILILIVQTPPQMQPTDGPQSSAHSQPNGPFPMLFLSLGPLITSRLHPDFAGHALRHILFDANAQLQHDARPLFKVLNEMLLRMDAEVFGALAPAEFSAGVGTAPSSFVSTPHARHRHSYADGPTVPSRSHIPPWAWA

SEQ ID NO: 171171 - protein, 71 aa, Heterodera glycines; identical to SEQ ID NO: 167185

SEQ ID NO: 171172 - protein, 136 aa, Heterodera glycines
KFVDFQKRFSKNYSTIEEKLTRFSIFVANFEQLEKIRREGEVYGITTFFDCSDEELKELIMPHEYFESVPFSWAKPIREFRPMDANFKRPSEFDWRKNGVVNRVKNQRRGCACWACATARLGQVTAPNSQRNTGSL

SEQ ID NO: 171173 - protein, 79 aa, Heterodera glycines; identical to SEQ ID NO: 126123

SEQ ID NO: 171174 - protein, 87 aa, Heterodera glycines
QLVFRLAQRELAPLATQIDRHDQFTKLREFWRLLVQNGLLGITVPAEFGGSERNYFDHCIVMEVLLPIGPKSGGIFNSAHFCHKLNS

SEQ ID NO: 171175 - protein, 182 aa, Heterodera glycines
DIGPVISQKAKERICELVESALEEGADVPLDGTNVTVKGFEKGNFVGPTVITGVKPEMLCYKEEIFGPVLCVLETETLDEAMDLINKNPYGNGTALFTRSGIAAHRFVSEIDVGQVGINVPIPVPLPMFSFTGSRGSFLGDANFYGKAGLNFYTQIRTVTQLWRSEDASTEAKPQLSFPQFK

SEQ ID NO: 171176 - protein, 87 aa, Heterodera glycines
LALILSSIAFRTMLRYLSKSLSSTRSALVDISSVHFSFYHPSKTSSPTGSLLLSEGEHSTASGSLVNVRMPNIKGEADGAVDHDQCM

SEQ ID NO: 171177 - protein, 159 aa, Heterodera glycines
MMMNSDNSSAINSKSFDQISEIGSMATDGLLQDDGVPDYAKIIIKQQQALIATLMNMQQQQQESRYASTISLFQQHQPHFLSNNDSSFPPPGIPTHPSPPPGIRPPVSPAPVSAPPPPPPGFRAPPGFNVSVSSRKFELDSTKSDTGGSHKFDIREELK

SEQ ID NO: 171178 - protein, 99 aa, Heterodera glycines; identical to SEQ ID NO: 167175

SEQ ID NO: 171179 - protein, 68 aa, Heterodera glycines; identical to SEQ ID NO: 167170

SEQ ID NO: 171180 - protein, 98 aa, Heterodera glycines
  unsure (1)..(98): unsure at all Xaa locations
XSFAFNSEIIIKTVTGQIDVKKVVSHFTVSSQSALNAVSDVFRKAPESDVPVLVKPLVRHRFLPETVAGLDDSNRETQKNDGDGQCEQMSAAGGHPFP

SEQ ID NO: 171181 - protein, 159 aa, Heterodera glycines
KFEHIFKISFQLFVPMTFFKEVDYLSLRLDDPVSALADYLPNSIIYTINYSLALPPNLVLLYMGLRPSLITSRVKFPTLGMTCANLFGLFGFLLLNIVYLYTVFSDVRLSLFMCSLLRTVFYNTTYVCYFLFPVLAVDQYLYVCQNVELSIRSLKAVIG

SEQ ID NO: 171182 - protein, 189 aa, Heterodera glycines
  unsure (1)..(189): unsure at all Xaa locations
MPIFGDPSSPYDEAVEKATAETMTNENWTLMFDICDRVASEGPRACKQCLLSVRKRLNHRDPHVVLLVLSLLDCLWNNCGTHFRREVSSKDFVGELNYKCTNSNRVVAERARSLVKKWAENECSKDXSLSLVESLYRDLRDQGLSFELDSTTNNHCQKKKAIVSNDPNVVSSEQEEADIAKAIALSLQE

SEQ ID NO: 171183 - protein, 135 aa, Heterodera glycines
MSSISPANPKKFSIPSETNCVVCVDIATGNHYSVASCNGCKTFFRRAIVNNRSFICMGNGNCPIDKGVRCACRACRLEKCLQVGMDPNAIQSERDRIGYTKRTRREKLVGFDEGIGHERGDLCAESFASNDADLE

SEQ ID NO: 171184 - protein, 111 aa, Heterodera glycines
  unsure (1)..(111): unsure at all Xaa locations
MFLKFLILAFCFQLAMANLFGQKQSVAVVGMLKCKGKPSAGTKVKLYDNDHFTTDDLMAQSKTDNYGRFKLSGXFKEITKIDPKLNLYHDCNGDFPFTPCKWKITIKALDG

SEQ ID NO: 171185 - protein, 199 aa, Heterodera glycines
NNLSSKFLKNGPFTKVALPFFSCFCFSTEAFEKAQKDMKQLKDEPDNDTKLELYALFKQANEGDVRGDRPKMLEFVARAKFDAWEKVKGMPKADAQHKYAEIVNSLLKNAGINNANTSETESDGIRRTKEGKVYKIELNRSDKYNAITWEMYEGLISALGDASADRETSVTVITGVGSYFWAGNGWGNLTRGGKTRDDL

SEQ ID NO: 171186 - protein, 75 aa, Heterodera glycines
TTTYPIYHSNYIFQSAFVGRAISQGNFAVRHAHQILRPIVQTLAETISERDVAFVATGGGGLIGIVGLVKGREKK

SEQ ID NO: 171187 - protein, 169 aa, Heterodera glycines
WIPRAAGFGTRLFDIFEHINTNEDVQFLRSSGNAGALAPQPLVPNTVYSLSDLCSAFSSAASLSAPPMGMASNSDAFGLRSTILPAAPLSAPPVGISTNSDDFGLRSTIVPAAPLSAPPMGISSNIDNTGATRERNHQYFFGHDFTTESFSSNSGTTRIRKPQPLNFSL

SEQ ID NO: 171188 - protein, 129 aa, Heterodera glycines; identical to SEQ ID NO: 163811

SEQ ID NO: 171189 - protein, 151 aa, Heterodera glycines
MSLSALKKQFNKANQYLNESIGTAEATKLDEEFTEMERKVDMTNELITQVIAGTNEYLQPNPAVRAKIAALGAMSKVRGSTKNQSYPQTEGMLADTMQKYGRSLGIQSDFGKALCDAADAFRQMADVKYQLEDNVKHNFLDPISDFQNNEL

SEQ ID NO: 171190 - protein, 74 aa, Heterodera glycines; identical to SEQ ID NO: 167139

SEQ ID NO: 171191 - protein, 144 aa, Heterodera glycines; identical to SEQ ID NO: 162267

SEQ ID NO: 171192 - protein, 128 aa, Heterodera glycines
  unsure (1)..(128): unsure at all Xaa locations
FQFISTKFEWIPLXKTIKCRAAVAWEPKKPLVIEQIEVAPPKEGEVRIKIMFTAICHTDVFQVSGINPNVKFPTIVGHEGAGVVESVGPGVESVRAGDHVIPMPLCQCRKCEECADPRTNLCQKFLYL

SEQ ID NO: 171193 - protein, 84 aa, Heterodera glycines; identical to SEQ ID NO: 167132

SEQ ID NO: 171194 - protein, 114 aa, Heterodera glycines
LFICTANVTDSPQRGLKDRMEMIEVAGYVAEEKLEIARKYLVPKCREKCALPDEKLVIKDDAIDSLIKSYCRESGVRFLFIAIEKICRKSAYQLVRGEGAGTQVLPIGVENSDH

SEQ ID NO: 171195 - protein, 102 aa, Heterodera glycines
MLKVIGNKNQFEAFVSSTEGESKRSLFVHFSAPWASSCAQLDDLLMELQREYGQNAFDIAKVDAESLPEVSMAQKVCAVPSVIIFKGGKVAGRVEGFQPAEL

SEQ ID NO: 171196 - protein, 171 aa, Heterodera glycines; identical to SEQ ID NO: 162363

SEQ ID NO: 171197 - protein, 140 aa, Heterodera glycines; identical to SEQ ID NO: 167118

SEQ ID NO: 171198 - protein, 293 aa, Heterodera glycines
MSLLPISRCSSLFHAARSLACRRPPPLASCHCLLSVPSTAPFSSHLSSSSPVVLHSLTTPVTSTHWCHRRAFASQSTPSAPVPNSTNNTPAAAGGGGIGLYQRYEQWLQNYPALYKLHRLTVDGSKWCYSDLKTFFWLAYGLRKGRITLNDLNARELFIYIQAGSQLVKLSLLAALAVLPAGFPLIIISMLVSPKLVLTRHFWTDWQSQQFQMDDLRRNERKLFPRIVDALRQHNPSSAAALAALEQQLPLTVDQLVTLQKSANIVPASLDAYTQQHRFFLKRVHNLPFWTTD

SEQ ID NO: 171199 - protein, 56 aa, Heterodera glycines
NKFYPTKPKVNGPISRPKKTTNPKIESIPIISVSHFFFPPGAAAFCADLVTFPPPS

SEQ ID NO: 171200 - protein, 116 aa, Heterodera glycines
QSFQAASVHFGPQFTWGLGLAFGVYISAQISGGHLNPAISLVQMANGSISLVRFALYIFAQLFAAFLGSAVAFLGHFENCMQIQTRNGNQEFSQLFATFPSPNLSIWGSVADQLIG

SEQ ID NO: 171201 - protein, 148 aa, Heterodera glycines
MRIWPSPFVPPSLPFALLLPFCFCVALLLRFGAGRDDAAVGELQHNRLHPPDTKEIQQCLSPDLEAEESTSGRFFAAVIDAGSTGTRLHLFEFSHELEQEPSAFKLEAEIYKEIKPGVSCFAKTPELAAENVRELLLTAKRQIPAELW

SEQ ID NO: 171202 - protein, 53 aa, Heterodera glycines
IMSSRRNEYLDAKVLGFSTIIFRKTVKIYVGGLPEDATSEEVFTHSNYASNVF

SEQ ID NO: 171203 - protein, 77 aa, Heterodera glycines
TIESDIIFDNLEEQMLFQHSSDFPFFQYPVESEIEKSSKFHSLRRDGRIFRPFRRVCLLSVDQFLQFASSVVRSFSV

SEQ ID NO: 171204 - protein, 62 aa, Heterodera glycines
ALGFVANKCAPLWGDWSFGACISSRITTVIQVRSQGQVNYSWCNEPYAVSLYGRLNLHMHGL

SEQ ID NO: 171205 - protein, 41 aa, Heterodera glycines
SAHFFSPENVLYKFLNLIFEETTKLYHCPIISYFAIGKSIF

SEQ ID NO: 171206 - protein, 163 aa, Heterodera glycines
DVNPTDDPKNRAKILTEKFEMDATDSRKIWCFGPEGTGANLLIDVTKGVQYLNEIKDSVVAGFQWATKEGVLCDENMRGVRFDIHDVTLHADAIHRGGGQIIPTARRVFYASVLTAKPRLLEPVYLVEIQCPEAAVGGIYGVLNRRRGVVFEESQIAGTPMFI

SEQ ID NO: 171207 - protein, 97 aa, Heterodera glycines
AAARGKADPDNDNNKPPPPKEKKQSNKPAPPEAERKTRRKKPTNVLAVPSAVEQEEGGAFLEMVDSLSTAVNSLSEASHSLSQASHSLSNSAAQEMH

SEQ ID NO: 171208 - protein, 98 aa, Heterodera glycines; identical to SEQ ID NO: 167095

SEQ ID NO: 171209 - protein, 119 aa, Heterodera glycines; identical to SEQ ID NO: 125262

SEQ ID NO: 171210 - protein, 36 aa, Heterodera glycines; identical to SEQ ID NO: 167080

SEQ ID NO: 171211 - protein, 66 aa, Heterodera glycines; identical to SEQ ID NO: 155643

SEQ ID NO: 171212 - protein, 39 aa, Heterodera glycines; identical to SEQ ID NO: 167077

SEQ ID NO: 171213 - protein, 206 aa, Heterodera glycines; identical to SEQ ID NO: 163784

SEQ ID NO: 171214 - protein, 39 aa, Heterodera glycines
FYRFLNVWIFWLTKTSSNLALSILIQIAPNFFYSLTRPY

SEQ ID NO: 171215 - protein, 84 aa, Heterodera glycines; identical to SEQ ID NO: 167070

SEQ ID NO: 171216 - protein, 79 aa, Heterodera glycines
RYGLAEDANFSRQALILSQKVPISASNKNLEPRQRSLSDYWLTNSIARASPTMAQCVKASRDYAVQPHTDPLRLANPHA

SEQ ID NO: 171217 - protein, 62 aa, Heterodera glycines; identical to SEQ ID NO: 167065

SEQ ID NO: 171218 - protein, 165 aa, Heterodera glycines
MRGTHNQSTKGQPKASAAKAVVQQQSPEMVAWLRRKEYDPRKAAADQSQREAQQRQQQNSFMACRFFSTSANAKTPFARWRQNRKSQQTMADQRSNRSHDDLSRLGESMDDESLHGVAVDPCSNSLQRTVDELTQKCHKSIELLKLCNQSGLSSSVEQLLEKVVE

SEQ ID NO: 171219 - protein, 41 aa, Heterodera glycines
IFKKAISEGLIIFQHNYYGISLFESVKVIICFFLIMLICCL

SEQ ID NO: 171220 - protein, 77 aa, Heterodera glycines
PSSTRPQIGTSFATFQCVGDKHFDGKSELTIWRTIEIRKDKGPEPKLSVQMDDKCVPFPLPDRPLPSKICFKWLRIE

SEQ ID NO: 171221 - protein, 185 aa, Heterodera glycines
LRIGDPPGCMTSARGALVVLGDKCRNQLAREYRDAIKLTYSQLGKTVPSFLEASIIADEILAIKDLPANPKINVVYNKFLSVIAYEPTHMHTISYADLKAAPKLATYEMEGDILSNLHQFMFATSVHWAMNEGHAAEFAARRSAMDNATKNAGEMVDRLTLLYNRQRQASITNDLVDIITGASAL

SEQ ID NO: 171222 - protein, 66 aa, Heterodera glycines; identical to SEQ ID NO: 167054

SEQ ID NO: 171223 - protein, 159 aa, Heterodera glycines
  unsure (1)..(159): unsure at all Xaa locations
SSSSPFPNCRCFLILFSVCCCCSLFCPFSNGENVYCTYYRDSNEITCGTVTCETHSPFTPDNSELDGLDTKLPRGWYRIGTLSIRHDRAXFNLYRRRATGLGYWDFYTQIPERNCIGQFGLHAGENIAGSVAVKDKRCFDRLVVQIERKSTTEKFDVLQ

SEQ ID NO: 171224 - protein, 97 aa, Heterodera glycines; identical to SEQ ID NO: 167047

SEQ ID NO: 171225 - protein, 91 aa, Heterodera glycines; identical to SEQ ID NO: 167045

SEQ ID NO: 171226 - protein, 49 aa, Heterodera glycines
CSSRLSVQISHQSPFHRQIRRQIHRRRSHNAFAEVEHLKFNLKKEQKTF

SEQ ID NO: 171227 - protein, 76 aa, Heterodera glycines; identical to SEQ ID NO: 167043

SEQ ID NO: 171228 - protein, 75 aa, Heterodera glycines
EFYFFIIFRKYVAVPTAYAAFPYDLGGVLPREMVSRQYNLTQMTLFEDGGHFAAFECPKELGEDIIRFAQGLSLD

SEQ ID NO: 171229 - protein, 64 aa, Heterodera glycines; identical to SEQ ID NO: 139860

SEQ ID NO: 171230 - protein, 168 aa, Heterodera glycines
MAPAKFALSLCSSTNGIDRPHLCDWDAETSHYIRDNTRIWLCRRRITVAGGNTTVASKAQPVEILRERPTLLQPSDNENNVMNGIPEMLTANELTHEDSTNNASEIMAAQGNETTSIVVDKDPLKELKMMRRRLIQLTKRVSELETQNAQNANERTLLLGIVSASTLL

SEQ ID NO: 171231 - protein, 154 aa, Heterodera glycines
MLETPRTIPGFHSAGPRRLSLATSHYRQFGIVSSPLATSSPSPMLFSSAAAATLPDRLPLRRPKKPPQKLPLLMPQLHLQFPSSRTNTIRSTDLSSIYTVQPEEAALDERNAHLLQCIQMQQELINQATAAIALCHKKFRFSGTLQELSAQRLL

SEQ ID NO: 171232 - protein, 171 aa, Heterodera glycines
MGPAALLLLLPSLLLLFLLIRALLELIPVSRLDKRSVLITGCDSGFGFDLALRCLGAGMRVFAGCLTQTGIQSLKKSAQEKGIAVELLEPIELDVTSDESVAKALEFVERKLGPGKGLHALVNNAGISGNEANAESWDDWLIPKDYEDVFQVNTLGTIRVTHAFKRLVKRE

SEQ ID NO: 171233 - protein, 66 aa, Heterodera glycines
VHLILIKCFSKSCELNIHFLISFNNSRPSVILFGRDLSLNTQWPNWPDDVWSWPQVMPCHFVFDVM

SEQ ID NO: 171234 - protein, 184 aa, Heterodera glycines
MVNILADLVALGDVEKRALDFLPRAARGYYESGADDEQTLRENREAFRNFLIRPFALRDVSQLDPSVTVRLSPSTANPKCRPFARTFACPIGIAPSAFHRMAHDEGEIATVKAAGETGTLMICSTLSTVPLEKVAEAAPEGSTLWFQVANWHLEKQSATDSMNEYFQLYIYKDRTLTEKIVRRA

SEQ ID NO: 171235 - protein, 126 aa, Heterodera glycines
  unsure (1)..(126): unsure at all Xaa locations
TNKLFIMKRPSSVVAFGSHLFVGFILLSLFIGTLGTEXKETKPAAAHSPADAKHPPPVAAHAAAGRGHAFDPKPASPSPLGLLVLVPRLIRPMGGPPTGAEPKMGGGSRFKKYRRGPHKVFLGVVG

SEQ ID NO: 171236 - protein, 135 aa, Heterodera glycines
MAELITKLCTTKLAILKWLQMLCAVITVLFLIDGQRQSWFYTLVFVVSIVFGLISLLTLIANFFLHSRNQSVPLPAFEIGFNALAAFVCLAFAVLLTIDSVRMFGDDFSHHRFLPPANIGKDGWRNRTLVVAIVQ

SEQ ID NO: 171237 - protein, 96 aa, Heterodera glycines; identical to SEQ ID NO: 167004

SEQ ID NO: 171238 - protein, 144 aa, Heterodera glycines
MSQHSGRFPVAVPPSPLHLARCELAAETVPIPKRCTLQIVLLRPCGSVVKLFMVAVNVLDMPSNSRTFIRQRVFSGDSAKGTGEKERSGNENKTGGSTNVPNAKPCSNSLRFLIHLRLASDSSGKVYLHSDIRILFSNKSKDLE

SEQ ID NO: 171239 - protein, 136 aa, Heterodera glycines
QETHIVLGIASVCSLLAIIATVVTLPSLYSEMSQMNSKVRDGVEAFRVNTDSGWTDWMEVQGVVNPPFKPPGNPFQSIFSWQRKWAGNCQGLGLPKPNCPFGPPGPSGTLGNPGNPGGRENPENLEKLGKPLFLGP

SEQ ID NO: 171240 - protein, 156 aa, Heterodera glycines
MYVERQFVRIVAVITMGGSSLRSIRRISSFYPSLSVNRPQRFSYVVQMSSDSNNVRHGVALLCWHCGGDSMTPSDDNAGTVLLCSRCGRLQPLPARIDFFSYFGLDDPAGATIGEAELKRRFRRMQSLVHPDKFAGRDENERALAEQHSAFLNNAY

SEQ ID NO: 171241 - protein, 88 aa, Heterodera glycines
LKVKEINDRTKGPIVGCPIIRVFTCCISIHPAYLSERAKKRKRDEKGFGGGSGEGEKARGRRGVREGGERVRGRGGEREGRRGKGGRA

SEQ ID NO: 171242 - protein, 52 aa, Heterodera glycines
  unsure (1)..(52): unsure at all Xaa locations
INENFQTNFLQSGSTHFHIHRXPXVIPTLGNFDTDKGRSPGVRGISNEIWWV

SEQ ID NO: 171243 - protein, 66 aa, Heterodera glycines
LQIHWFKLHMRYISKFFDSVRRFDKDGFRFAISRSTFGNWSRIFSAITCNHHDCEVWPTKKKVIAF

SEQ ID NO: 171244 - protein, 183 aa, Heterodera glycines; identical to SEQ ID NO: 166979

SEQ ID NO: 171245 - protein, 207 aa, Heterodera glycines
  unsure (1)..(207): unsure at all Xaa locations
PTPSWRHCGWPVHSSRHLHGRPGRVSSSVPGPRTVAELPKSFLEQHHLTVAFKVLKVHRSAIHLAICSNPIKPIKLYWQWNERVMGVYWRQGNRKKRLXPEISQMCDRGNVTVEKSQLLFVLFVAFNLCLWLQHRLSMKSEQDGNRIINAEKWAVSIVRCVHWSVRAIILRLNASNSLVSNHLPNQSPMQWKKARSLSMWNRSRKKF

SEQ ID NO: 171246 - protein, 122 aa, Heterodera glycines
GEQRLRPASPGRPGPQGPPGPDGQPGNPGESGQPVLFGKLTQGPPVVGPPGPSGPPGQPGQPGENGQPGQPGNPGPQGYPGDGGSPGQPGNPGGSGEPGQPGAQGSSGQCYHCPPPRTAPGY

SEQ ID NO: 171247 - protein, 73 aa, Heterodera glycines
AKSSRIAHELVTAELIDGHDLVVVAANLQKLIDLAQKKAERRTITFALNSGVASNEIPDERSLTGFAQLSLLD

SEQ ID NO: 171248 - protein, 111 aa, Heterodera glycines
AEFPIPANKNGDCFSLPQSPQIYKQLLMCGSIDRYYQVAICYRDEDAKPDRQPEFTQLDLELSFTSQEMVLSLIEQMIVNSWPDEITPKPTIPFPRMSHREAMDKFGTDKP

SEQ ID NO: 171249 - protein, 192 aa, Heterodera glycines
MESSDANNNINNSEGEAENTTKNGGEEGVEKKILSKGVSGVVKWFNVMNGYGFICRDDTNDDIFVHNSAITANNPSKIQRSLGDGEKVMFDIVDGAKGPEAANVTGPDGVPVQGSKYAADLSQRRRFAGPRRNYFFRGNRNRRPRHSEEAAGGEVPVGEKKEGAEENNRRNVAGSTSGGTENEGEQKKEQTQ

SEQ ID NO: 171250 - protein, 159 aa, Heterodera glycines
QRKICLIPISAHGTNPATAHMSNFRVVPVESDKHGNINYKDLSAKCEKHGAELACAMITYPSTHGVFESNILDVCQKVHEFGGQIYLDGANFNAQVGLCRPGDYGSDVSHFNLHKTFCIPQGGGGPGMGPIGVKAHLAPFLPGHPIVPIKGNRSGAVAA

SEQ ID NO: 171251 - protein, 108 aa, Heterodera glycines
MLGHFSKLSVRCYASATRFRPVFDRVLIERFLPEQKTKGGIMIPEKAQGKVLKGTVVAIGPGYRNDEGKTIPMQLQIVFRVLLPEYGGAKILVRHKEGGGVRGADVIG

SEQ ID NO: 171252 - protein, 114 aa, Heterodera glycines
MCKKTKSEPCCKKQVVELRNDIATNGCIAGGIECCDLTAHTVQRRPQTTGQLFLEELYFVKHVDNNSLADSPREREILAEYRNLLYSIILNGLRQWSKSGVLAQITNGEQFEHA

SEQ ID NO: 171253 - protein, 98 aa, Heterodera glycines
PFTDNRIHLKHKGRLDHHHHCIGSILSLWTRTSVIVILVTSLPLSGYLLVVSCIHLYKSGSRYFASSGGTSTPASSLAGGSSTGDALIPMVVAGAQVL

SEQ ID NO: 171254 - protein, 175 aa, Heterodera glycines
AFKHNFQMTNEITPNTTFGDITSDRVFYRPTFVTGDQMDLSLAALALREGSKSPTESVCSFDLMSAVGEDGEQNIADELASNGTAGEVEEQQQHTKQNNKQNNEKKCFAILKVRPISVNSTAAHCPNLKFEFVSKNTADNGTTQQQQLSTAASSSSSSAAASSADEVPPIAPSVG

SEQ ID NO: 171255 - protein, 52 aa, Heterodera glycines
KQSAGAEGKLTCAGEPLADVKVKLYDDDRGVDTDDLMGETRTDSEGFFFIGG

SEQ ID NO: 171256 - protein, 86 aa, Heterodera glycines
  unsure (1)..(86): unsure at all Xaa locations
MQETHIVLGIASVCSLLAIIATVVTLPSLYSEMSQMNSKVRDGVEAFRVNTDSAWTDLMDVQVVVTPPSKPRDNPFXPFFRAKRQL

SEQ ID NO: 171257 - protein, 44 aa, Heterodera glycines
NAFLKVLTEYPSLSFGSSVVKQFQKYLFPKNCLYLRRQSKKITK

SEQ ID NO: 171258 - protein, 68 aa, Heterodera glycines
LYFSAHWCPPCRNFTPVLKKFYDELKKSPETAPFEIVFVTFDRSADDLSNLFRQSFFFWLGIPLGKAT

SEQ ID NO: 171259 - protein, 61 aa, Heterodera glycines
RSEMAAVDQHQQQLVERIKQLDTLSTTADEQFDNSLNVPIGDLCRLLLAALAGDELAAGEA

SEQ ID NO: 171260 - protein, 158 aa, Heterodera glycines
ANLWDSRADNCFYAARYHGNVSDQFHEKVKYWEIEDVQNVSDRRISKDCSGSFYGCQTHACIDAKGNPVFVFNLCASSAAASGENNTGHCSHPELEELCAMEGGKSKCAICENGMCNEANIELQNVMGLDINGTIGTAVGGEWHEKCQNGRDRRRHDG

SEQ ID NO: 171261 - protein, 174 aa, Heterodera glycines
YNSGSPGLQVSGTRSFSPVQIFNDEASEERAENARLSSFIGAIAVGDLVKSTLGPKGMDKILQSMSTGEIMVTNDGATILKSIWLDNPAAKVLVNLSKVQDDEVGDGTTSVCVFGSELLREAEKLVNQKIHPQVIIEGYRIASAAALKALEAAAVDNGSNPEKFRQDLINIAKT

SEQ ID NO: 171262 - protein, 159 aa, Heterodera glycines
LINSGRYPAENLMASCPKTDESLLEQCKKLGIGTTSDNTRIARENDVIILAVKPMNISKVTSEIAPNFRREHLLISIALGITLRYIEQLLPSKSRVVRVMPNTPAVVGAGASAYSMGSACPDGDSKGGPELGCPRGYAARGADGALEPTQADLAGPGPG

SEQ ID NO: 171263 - protein, 69 aa, Heterodera glycines
TLLVQKIYISVPAMRHDTDDRQNANKNARIKKNSENGAASKCRTPRNRLTLILLLELFERFAACDHNRP

SEQ ID NO: 171264 - protein, 69 aa, Heterodera glycines; identical to SEQ ID NO: 163649

SEQ ID NO: 171265 - protein, 57 aa, Heterodera glycines
  unsure (1)..(57): unsure at all Xaa locations
ASLCLFTHLTIIQILFGFFPLSLFFFPFFFLFFFLFFPPPPPXPXXXXXXXXXLXXF

SEQ ID NO: 171266 - protein, 57 aa, Heterodera glycines
GDPMKLEGSLRGHNGWVTQIATNPLYKNMLVSASRDNTIIVWMLDDSGSALPANRYH

SEQ ID NO: 171267 - protein, 204 aa, Heterodera glycines
  unsure (1)..(204): unsure at all Xaa locations
MVERRKESPKRRRRSSSSSSSGSSSSTGSSSSGSSSSSSTTASRSPSPKKQRAAARPSARDDRTTRRSPRRSRSPHRVQPKTEKSTVSSRRSPSPRRRRPSPPSRGPRRRSRSPRHERAAPSPPPVKRERTPEPPPRRLCVRNLSRNITKXHMEEIFALFGALKSCGVPMDRVHVHLPRGYGEGXYERGEEAEEAAEHKERRPE

SEQ ID NO: 171268 - protein, 168 aa, Heterodera glycines
MTTIAANGGGETFSRKVFVGGLPLDIAQQTELELSRAFRQFGELQIEWPTKRVNQGKTTLDGKPAGPGYAFIVFADPRSVGLLLSKCRREVTAPGEKTRRYFLTLSSRTVHNKPVQVRPWRHSDAVFTPRSGLPVNIRWTVFIGGLPRPTRAIDLCRVLMPPIRGGVC

SEQ ID NO: 171269 - protein, 83 aa, Heterodera glycines
KCYAFHANRSGLHFHCIGHFTVPITSIGFLTGCDFVRVVLLEEIGNFSFAHPVVVLLGQTLGQFFYHFLFCAKQIENTCLAFA

SEQ ID NO: 171270 - protein, 208 aa, Heterodera glycines
MTFAFAVLLLLFIPPLTLAKNARAEGPVPVVLWHGMGDSCCNPYSMGFIRKLILTNMPHAYVLSLQLGSSVAEDIGRGYFANMNDEVAAVCQQLAEDARLANGYNAIGFSQGALFVRALAQRCPYPPIRNLISIGGPQQGIFGLPFCPGSFYICSFIRRLLDNGAYTEFAQHNLVQAQYWHDPNLAEGYCRANIFLAHGNCERSCHQP

SEQ ID NO: 171271 - protein, 210 aa, Heterodera glycines
MVDCPQQNGHRQQLPLFNASEHFFEGAEKLFEIWFDNDQQKRENGHKSTLRTIPENELRQLLNTAGCHILQVLRTAEIDAYLLSESSMFISDRRLILKTCGQTRPLLVIGKLLELARKHCQMDTVTNVYYSRKNFFRPHLQPQLHATFDEEVDYLDGFFQGGSAFCMGPLKHDRWYLYTLTTPRAPLDCSDHTLELANDGIPVELLSAYS

SEQ ID NO: 171272 - protein, 107 aa, Heterodera glycines
HLLDQFVAPALRLWMVIDLVSSVLLVMIVIKKCFVRIRIPRTKRQIELRAAKRRKRKALKESGGGDGGESQESEHNQYRWLGEWGAIWGKRKWAIGKVGNGGSGMRK

SEQ ID NO: 171273 - protein, 188 aa, Heterodera glycines
MKLFLLFSLFLIQFSSAIDNMEHLMPENDADSLISYLEFQRWHKAVMGAEPRESSILFGKNDKDADGMLTVAEFVPLAFELSRKPPERQTDKIFKKFDVNSDEQLDRQELLKGDSISEEIVDGLFQVADVNNDGRISFDEFSTVANTLESRLSKDEKSAGMAMSLLAQLDTDKDERINGTELFEYAHK

SEQ ID NO: 171274 - protein, 81 aa, Heterodera glycines; identical to SEQ ID NO: 166911

SEQ ID NO: 171275 - protein, 176 aa, Heterodera glycines
  unsure (1)..(176): unsure at all Xaa locations
TPCWPSTSRSRVFRWRTARENGTRICVSKRRKTEALGRVKQLRLRTKRINGRSARAARNDSRQMERDRILFQRQRFPTVASIHHQPATSSASGVLVPIPTTDGAAAVPGSAGGYQRRYSTHREQQLQQRNRRDSKFSRRLAVYTSPPEDSAAGAISLRPLNTTIISXSPRTGSSSD

SEQ ID NO: 171276 - protein, 124 aa, Heterodera glycines
MHTVDLSQRFIDSLPSSFFLGEHATYKDHAAISLLNLAHNHFVTVPPLVAQFINLISLDISNNHLALLPKEISSLKNLRELSLRNNLLENLPKEFQRLQCLRELNISGNLLEHFPRELLQIKSL

SEQ ID NO: 171277 - protein, 109 aa, Heterodera glycines; identical to SEQ ID NO: 166890

SEQ ID NO: 171278 - protein, 136 aa, Heterodera glycines
  unsure (1)..(136): unsure at all Xaa locations
MEVGIERMESDENLENLPKVDWTITPEPIVIRGVGHLTLFGLNSHFPTEFPSALIGKLAPXEFDDTLRRVNYVLHRNVSRNLRWLICGLLFCCCSFSISLWPAAXLNRRTISALRKTLDRGNPNRFPNPASQWQLA

SEQ ID NO: 171279 - protein, 94 aa, Heterodera glycines; identical to SEQ ID NO: 166888

SEQ ID NO: 171280 - protein, 100 aa, Heterodera glycines; identical to SEQ ID NO: 166887

SEQ ID NO: 171281 - protein, 71 aa, Heterodera glycines
AALHHFSKMMALDESDIVTVFIHPGWVKTEMGGANAMMSVSDSVAKIMARICALTKSDSGKLLYREKELLP

SEQ ID NO: 171282 - protein, 202 aa, Heterodera glycines
  unsure (1)..(202): unsure at all Xaa locations
MLSETVKIGFIGAGKMAQALARGLINSGRYPAENLMASCPKTDESLLEQCKKLGIGTTSDNTRIARENDVIILAVKPMNIIKVTSEIAPNFRREHLLISIALGITLRYIEQLLPSKSRVVRVMPNTPAVVGAGASAYSMGSACRDGDSKGGQDLFSTAGYSVEVPQVRVEPTAEXAGAGPADGCSVIEAVADGRTSSGLAQE

SEQ ID NO: 171283 - protein, 55 aa, Heterodera glycines
WLNTLLLGCLGASRDLARLSWRFSRIQPGCPVAYPDQPGSSGDYPDQPVCPGNCP

SEQ ID NO: 171284 - protein, 66 aa, Heterodera glycines
LNQLSETRLHLKATKTRVTREDGSVIEEEKTENGEFVVIFERANGNGNPSGFKQSKRMQKGRGYVI

SEQ ID NO: 171285 - protein, 99 aa, Heterodera glycines
AEGFKNNTWCHKIFLARSKKKTLRVPSRNFFLYTGLNSLDHPEKCVHCQMDVALLLARSGASIEKKNRQNKTPIDLVDGKEHKLKLIKASESVKPTAGT

SEQ ID NO: 171286 - protein, 196 aa, Heterodera glycines
  unsure (1)..(196): unsure at all Xaa locations
DIFILKNACRKTTNGHAEFTKFLLNVGTAPCIVDFFATWCQPCSAIAPGFDELSNNYLNLKFVKVDVDKCEETKNTYGVSAMFSFIVLINGQRVDLLRGADKTALQNLAHKWSKNCPTQMVSPIPGQCELSPLFNKIQCXCLNEDDSNNLNNLLNGVGPLITDCDEQLLISGAVHQPGQGDSGLFNGPRRKGAEKL

SEQ ID NO: 171287 - protein, 54 aa, Heterodera glycines
HNFAFYLQFLFNGIKSLLSNHFIKMHQCLCQQILRGCCGSVWRRSQIIARIVSN

SEQ ID NO: 171288 - protein, 86 aa, Heterodera glycines
KLFGYRRKKVTKKDSLTGRNNSFPVPYLSKLEGNQLQPGQSLIVRGIIISSDEFVINLTNGPRVELDDEVRTLDDRPPRLFFFMGQ

SEQ ID NO: 171289 - protein, 81 aa, Heterodera glycines
  unsure (1)..(81): unsure at all Xaa locations
KYFFKTYFYFILTIFSSMSTNRGRGRVSLPSGDHSQTSEYGGRGRGMYSFATRQGRVKHSSAWPVGRWKLSFCREEREXKR

SEQ ID NO: 171290 - protein, 126 aa, Heterodera glycines
TPAPNSTNNTPAAAGRGGIGLYHRYNQWLQNYPALYKLHRLTVDGSKWCYSDLKTFFWLAYGLRKGRITLNDLNARELFIYIQCAPEVVHITTIFILLAIPVSGELVTLLALVSPKLVLTQHFWTE

SEQ ID NO: 171291 - protein, 127 aa, Heterodera glycines
PRRSDHFAASVDKCSDHSVPSSALSRGVETNPSAVRPANSAAALFQLPAEYDNGQPKRIRQHRTNDHRRLGYFWRSGQLRRHSASFIVTRKRYALPEIRTKVPSFVHIISLICKYVYSFHRKKQVYF

SEQ ID NO: 171292 - protein, 50 aa, Heterodera glycines; identical to SEQ ID NO: 166847

SEQ ID NO: 171293 - protein, 158 aa, Heterodera glycines
ALKIFYWMELLPEFDMLLAICGSARQLAVIHLQQIHRAFKVAQQPTVSCTNIANIEQCHIAVVSNSEHHRDKRTITDDRILFKCRAAHRTGNGLNAGELLFTVSSEDRVELHIFGHADAAHLQQPQQHQQSVKSILKRKILIHAFRQLLFILSNLIFV

SEQ ID NO: 171294 - protein, 52 aa, Heterodera glycines; identical to SEQ ID NO: 166837

SEQ ID NO: 171295 - protein, 88 aa, Heterodera glycines; identical to SEQ ID NO: 162221

SEQ ID NO: 171296 - protein, 119 aa, Heterodera glycines
QYFAQERTDVQTKQIFLAICRSFVSPAVPLTVPLSEDRQGNIYVSWDVLSFDGIRRSFAGALAWQKSQFEAFLTIICLIASSTLSQAVLQTASELRRKLRLIDEFFADPFSYAQERQKR

SEQ ID NO: 171297 - protein, 78 aa, Heterodera glycines
SAGEMERENRRVRSTRLSQQRYREKGNEARNLLPQLYSRIAELERENNLLKDLLWRERDPNSFAVAQQQKMVEKKLRK

SEQ ID NO: 171298 - protein, 197 aa, Heterodera glycines; identical to SEQ ID NO: 166832

SEQ ID NO: 171299 - protein, 127 aa, Heterodera glycines
HDLEGLFARLKELGIKIAICTADSRAGTTRVLKTLKVEQFVDLIVCGDDKGSVPKPQPDNALFICRQLGVDPKNAMVIGDTPADLGMGRSAKLGSIVGVLSGIGEHKELNEADHLVEHVGELLPLIG

SEQ ID NO: 171300 - protein, 194 aa, Heterodera glycines; identical to SEQ ID NO: 162312

SEQ ID NO: 171301 - protein, 86 aa, Heterodera glycines; identical to SEQ ID NO: 162235

SEQ ID NO: 171302 - protein, 140 aa, Heterodera glycines; identical to SEQ ID NO: 163832
  unsure (1)..(140): unsure at all Xaa locations

SEQ ID NO: 171303 - protein, 40 aa, Heterodera glycines; identical to SEQ ID NO: 166827

SEQ ID NO: 171304 - protein, 100 aa, Heterodera glycines
LFSQIFNQMACSVRLDHHILLPSHFFPKFPPHGPPPPIPPQYGEPYIPRLARRAAGSLSTLSSCAVISAEKAHKTTKRKAMIKRRGDILRAISARVLKGN

SEQ ID NO: 171305 - protein, 92 aa, Heterodera glycines
  unsure (1)..(92): unsure at all Xaa locations
KDFVPYTTDRNLVDEWIKTNDANAFLXSRRLISGEGLLCGGSSGANVWAAMEVAKRMGRGKRVVTILPDGIRNYMSKFIDDEWMRVKGFEGI

SEQ ID NO: 171306 - protein, 87 aa, Heterodera glycines; identical to SEQ ID NO: 163280
